United States Patent Application Publication US 2026/0234588 A1, published August 13, 2026 (application 19/632,884).

The application's sequence listing, which the Patent Office published only in electronic form, follows.

SEQUENCE LISTING (924 sequences)

SEQ ID NO: 1 - protein, 1439 aa, synthetic construct
MKRILGLDLGTTSIGWALVNEAEHESEQSSIIKLGVRVNPLTVDESSNFEKGKAVETNQVRRLKRGAHRNLLRYKQRRATLLSILRKNGFITDQTLLSENGANSTYETYNLRAKAVVDKISLEEFARVLLMINKKRGYKSSRKAKSGEDGKLIDGMTIAKRLYDENITPGQLCFQILSEGKKVLPDFYRSDLQQEFDRIWDYQAQFYPEVLTFELKERLVGKNASQTWDTLAQYFVWTEQRKVWNETLAQNEVKDVVFQLTKPNRKVKGVELKKENYEWRHKALSEKMHPENLAIVFQEINADINKSSGYLGAISDRSKNLFFNNITVGQYLMSRLNENRHNSLKNLVFYRQDYMDEFETIWESQARFHSQLTPELKAEIRDVVIFYQRRLKSQKSLISMCEFERQEKEVVCNGKTKTIVVGSRVVPRSSLLFQDFKIWQTLNNVEVIVVDDFGKKKRAKKNIISPSNATEATETLELEGRRRLTQEEKEMLAEELSIKAELKKSQVLNLLFGKTESLDLNFECLKGNTTGHSLYQAFSKMMDLSGHEPLDFKKSTSDLKSQTYAVFKTLGWNCNILDTQIYLDKALDEQTSYKLWHLLYSFEGDNSATGDSKLKEKLTTLCNCPADYVGPLMDIVFEDDYGSLSAKAIRKILPYMKEGCGYDVACTYAGYRHSASSLTKEEIEQKELLDQLELLPKNALRNPVVEKILNQMVNVVNEIINTYGRPDEIRVELARELKKNQKEREQMTKAISVATKQQEQIRELLQKEFGISNPSRNDIIRYRLYEELKANGYKTLYSDIYIPREKLFSKEIDIEHIIPKARLFDDSFSNKTLEYRSVNINKGSQTAYDFVRETYGEEGLKRYLSACTSLFAQQKTKLKKLKMTEAEIPADFIDRDLRNTQYIAKRALSMLHTICRSVVATSGSITEQLRKDWELIDVMKELNWDKYAAIGKVSYHQDRDGRQIGRITDWTKRNDHRHHAMDALTVAFTKPAFVQYFNNKNAAHQEGSELYAIRNSYFQNGRAKAPIPLHAFRAEALRHLEQILVSIKAKNKVVTLNVNKVHKPKGGTYTKVQLTPRGQLHNETIYGSRREYATKEETVGSAFDMEKIATVCKAIYREALLWRLNEFGGDPKKAFTGKNALDKNPIWLNEAHTKAVPSKVKTVSFDTTYTIRKDISPDLNVAKVVDAKIRKLLEARLEAFGGDPKKAFTNLEENPIWLNQAQGICIKRVTIYGVSNAQSLHDKRDKEGRLVLDEQGKTIPVDFVNTSNNHHVAIYQKPVLDKKGNPILDENGEPRMELDERVVSFYEAVARVNQGLPAVDREYKRDEGWKFLYTMKQNEYFVFPNETTGFDPREVDLLDPNNYALISPNLFRVQTMSKVMYGNSTVRDYKFRHHLETTVCDMKELRDLTYKQYKSLQFLRNIIKVRINHIGEIVSVGEY

SEQ ID NO: 2 - protein, 1222 aa, synthetic construct
MKKVLGLDLGVGSIGWCLIEKDENNIPVRILRMGSRIVPIDSDEESGFTKGNGKSKNSDRTAKRTARKCYDRYQLRRHALINTLKRLGIEPNNIPEQTPLELWQKRADAASKEISLEELGRVLLHINQKRGYKHSRLSNSNREETVYVQEVNSRYDNLKAEGLTIGQHFALKLKENEQTSEDGKKYYTYRIKEQVYPRHAYEEETKKILEVQKSFHSDILTTDVCKEILNIIFYQRDLKSCKDLVSFCEFESYTIKKDGKEITIGPKVAPKTSPLAQLCSILETANNITIRNRRNDELYILPEQRKALADFLDNNEVLKLTNLYSILNINKKDGWWAGKAIGKGLKGNTTKCEIRKALCNLPTDQIEALTKFELKIDEYVDKETGEVRKRIDNTYAERQPLYRLWHLIYSIKDADELSDALHHLGIEDKETIQKLCNLDFRTAGYANKSAKAIGRILPYLMEGMMYSQACERAGLDHSQRIDPERTLLSSLPQIKKNELRQPVVEKILQQLVNIVNLLLKEEGQIDEIRVELARELKQSKDERNETFRRNNQNERKNKEYAERIKEYGLTPTRNRIMKMKMWVESEHSCMYCGQPVDVKEFLQGADVEREHIIPKGLLFDNSFTNQVCACRSCNSKKGMRTAYDFIESERGEEGLRSFIEHINYLFDKKQISRSKLNRLLVSYKAYQERKAQGKETEEDKNLWENFIDRQLRQSQYIARKAVEILQLVCRNVYSTSGMITDLVRQQWGYNDILHDLNFERYKKAGLTTMVTKLHSGKEVEVERIKDWTKRLDNRHHAVDALAIACTTQSLIQRLNTLNASRDEMLIDLINKDERIIDPERSMLEKWICAQPHITYAQAKEEIDKIIISQRPNTRITVPGKRYIYKNGKRTLAQRGIIVPRGALHAEFVYGRILKQENTQEGIKLSPQYVRKYKLGIGAQGFLFNGKEFYKEELKKDPKTGIVTIVVIDKIKDVLDKIVDGGIRRRILERLNRGFEEGKDYRTNVPQALANLKNLDEEPIYSDDAKTRPILSVRKYVPSTTMVAVRRDGNGRPLAYAEPDGNHHVAFYRNEDGLITEQIVTKWQAVQRKLHDIPIIIDNPTQLWNDILERNDIPDELLQTLPNDKSSLMLSLQIGEALVMGMDETDFKKAIEEKDMRTLADHLYFVQNLSSSNYRLRRHVESSYDITGMNKEDQRFLNIKSIGALINYNPHKVKITVLGDIIP

SEQ ID NO: 3 - protein, 1216 aa, synthetic construct
MKKRILGLDTGTNSLGWAVVDREENGQYTLVDKGVVIFQEGVKIEKGIESSRAAERTGHRALRRQYFRRRLRKIKVLKTLVKYNLCPALTEDDLELWKLRKIYPKKDEFMAWQRTNDNEDINPYHCRYICLNEVLDLDRQQDRYTLGRAFYHMAQRRGFLSNRLDQTDEKETGKVKADIKTLSKEIEDSGCKYLGEYFYILYKEKGNTVRIRTRYTDREQHYKKEFFAICEKQKLPKEMVEEVARALFFQRPLKSQRQSVGKCTFEKGKPRCSDSHPLYEEYRMLSFLNSIRIQGPWDVNGYRPLNDEELKRIESLFYRKSKPNFDFEEIAKKIAGKNQYQWKDDTKVNMPYKFNFRMSQGVPGCPTIAQLKEVFGEEWKEGIAETYTLSTKKDGTQKSIDELVNDIWNVLFSFDSKDKVKEFGVKHLQLDEEQAKKFSEIRLSRGYASLSLKAIRNILPFLQMGMIYSDAVFFAKIPTIIGQSLWAERQNVIKEDLAYAIQMAMKEKRRIDEAVKDYLLDNFDLKPGATELLYHPSMIETYPDAKPNKDGIVLLGSPRTNAVKNPMAMRSLHEVRKVVNSLIKEGKIGPDTEVHIEYARELNNANMRTAINDWQKEQERNHNQYAEEISKLYKEATGKDIQPTDLDILKYQLWEEQGHICLYTGKKIGIADFIGAGPMFDIEHTIPQSVGGDSTQENMTLCSSHYNRYVKKAKLPTELAEYESIMTRIEPWKEHFEELSKQIDHISTRGIWDKATKDAKIRKKNRLLLEKKYWQGKYNRFKMTEVPEGFALRQGAGIGIISKYAALYLKSYFHDSLHPERRQVYSIKGALTKEFRTMWGIQLEHEKKSRDNHTHHCIDAIVVACIGKNEISKMGEFFHTEERYKMGEGQRPPQFEKPWPTFTQDLKQITEELLVVHDTPDNMPKRASRKIEISGGRRVVAKGDCARGSLHQDTYYGAIERDGEIKYVVRKPLSSFTNIKDLDNIVDDAVRQTVLNAVEGKDFKKAIAEPIYMNEAKGILIKKVRCYTPTVTQPLDIRRQRDVSRKEYKQQFHVMNDENYMMAIYQGIVKGKRKTKFALVNAMDAAKFYKRSTDRNDYPSLVPEDKDGLPLKWCVRKGTQLIMLEEDEESVSLANEEEMSNRMFTITKMDKVGRLTCRNSKEARTAGDLKSFVNANPFKLKDGYRPILCMSPINFHFLVEGYDFTISPLGEIKLKH

SEQ ID NO: 4 - protein, 1207 aa, synthetic construct
MNKKRILGLDTGTNSLGWAIVDQDESGQYTLIDKGVVIFQEGVKIEGPKEFSKAAERTQHRALRRQYFRRRLRKIKVLEALVKYNLCPALTEEDLSLWKLRKIYPKKDEFMQWQRTNDNEDVNPYHYRYICLNEVLNLDRQQDRYTLGRAFYHMAQRRGFLSNRLDVKEEDESGAVKSGIANLSKEIEESGCKYLGEYFYKLYKEKGNTIRIRTRYTDREQHYKKEFFAICDKQHLPEEMIAELARALFFQRPLKSQRQNVGNCTFEKGKPRCSDSHPLYEEFRMLSFLNNIQIQGPWDEVYRPLNEEERQKIDSLFYRKSKPNFDFEEIAKKIAGKGKYQWKGDTQTDLPYKFNFRMSQGVSGCPTIAQLKEVFGDDWKKGIAETYMLGTKKDGMQKSIDEMVNDIWNVLFSFDSKEKVKEFGIKNLQLNEEQAEKFSKIRLSRNYASLSQKAIRNILPFLRMGMIYSDAVFFAKVPAIIGQNLWEARQSEIMEDLSYTIQMAIKEKRHIDEAVKDYLQDNFDLKPGAAGLLYHPSMIETYPDAKPNKDGVVLLGSPRTNAVKNPMAMRSLHEVRKVINNLIKEGKIGPDTEVHIEYARALNNANMRAAINELQREQDRKHKQYAEEIRQLYKEATGKDIQPTETDILKYQLWEEQGHICLYTGDKIGIADFIGASPTYDIEHTIPRSAGGDSTQMNMTLCSSRYNREVKKTKLPTELAEHEFIMTRIEPWKQRIEELRKQIDRDKKGNESDKAARDKRIRRKNLHMEELKYWEGKYDRFTMTEVPEGFARRQGAGIGLISKYAALYLKSYFHDTLHPDRRQVFSIKGTVTSEFRKMWGIQDEYEKKSRDSHTHHCIDAIVIACIGKNEFNMMGKYHHDMYDYNEGNGPKPQFDKPWPTFTQDLKQITEELLVVHDTSDNMPKKASRMIEVNGKKVVAKGDCARGSLHQDTYYGAIEKDGEIKYVVRKSLSTLKESDVENIVDDVVKEKVKQAIAEKGFKDAMAGDIYMNEAKGILIKKVRCKTGVTQPLQIREKKRRDLSRKEYKRPFYVVNDENYMMAIYEGGKMQMVTALDAAKFYKRSADRNDYPTIAPMEYKGRKLKYLVRKGTQILMLEKNEESISTTNPQELFKRLFTIMVLEKDGRLMLRHSSEARPATEVKKLLTYNPFMLNDDTRPILRVSLSKLNFLVEGYDFTITPLGEIKLIH

SEQ ID NO: 5 - protein, 1262 aa, synthetic construct
MTKNLKYYLGLDLGISSVGWAVMAEDVTTGKHTLHDFGVRLFDVAEESKTKTSLATKRREFRSTRRLIRRRFHRLEMLKRHLNQINLFDKQAFIDNFQTQFKVTNKIVFQNNQWTTESGYFNPYVLKAKGLDYKLSKDELYVVLINYAKKRGYADKFSLENDENQSKDDKTTKAKTTKLTDSANKASELIKKYQSIAKAVIQDSQFHLSASKTTRILFTKNSSKLVYKKSKSDQYKKYIDVNSVIDKKQRDELSKRINFRHLFDRQDYQNEAKTILSKQKQYYPKELTNENCEKIIKIIFQSRDFEMGAKCNDCTKVMIDSPDSYQNQLHKCKNKHCSNFGIFWDMTGKCHFYPTENRGTKASILFTVFYYVNELSKIWNILANHKLILTPTEKQSVLQQMLTSDWKDRRAAIKLIQIAIQASAAWKIHGNKDLLDSKKIKIWQSEKSSGLELKRPSFFKTCWETSTLKPFLTKITINEKNIDQWEKNLISQIGSFTSRWITPHRRKKAIENLLNKFQIKFDAKTMNQFLSPKLVTSPANVSFQFMKEAIQAYLKGINFADFQAEKVKQQDEVIQTRFKKNSNSKKLFAKFTDLEMTSNPVVFRAINQTRLILKALHKKYTQFENIAVEVGRDIYKSAKDRNKIEQAQDKNLKKKIAIIQKLAENNIPQNQKTILAYLLWEQQNKQCIYSGKTIDLKDINPVDKMVEIDHIIPRSWSADDSRNNKVLVLTEENQQKGQQIPYQYLKNNWKTFTMRIHKLENYLGKTKTNYLLAKTVEEAVEGFASRNLNDTRYISKYIHNYLLSEFKNHQIKTNVFAVVGQVISRLRRKWLASSAWGLDQKVRDISPFHHAIDASILCQFKKKMDIELAVDLIKLKDLKTAIDRFESEGNPTKLTNALANKNAFMESIKNKIKTLKTASKNDQKKRFYNVNEYMERIYLADRKNQFVNNLYIDDFQNQLEKRIPVELEILDCKCFDTETKKILNLACQNCNGSRKLPKYVNVLNEEEWKIATKDLDTTNIDLHYPHISRMVRYKVRGQISSSENLGFVLNGLPNPKKTILEKSKNKLFRLWLRNNKITYTDAKNQINNIYFSNDYFNNWIIEFCNWKDPKNKSKPFITSGNVDGKVGNIIEIKRFYGLKTPLQKLDSSNQQKNQYEWISIYDAKKNKNLFQDYSKILLHNKLIKYYDNKIYNKNLKKNGKYIVKCFFSRKDEKKAYLSVNSLTKSTDKTQKIFNFNNSVDSVSNLFKNKWSLIEVDLLGKVI

SEQ ID NO: 6 - protein, 1065 aa, synthetic construct
MDTPYLLALDLGTSSIGYVAFALDDSDEPKSILDLGVRIFPDGRHPKTKEPLAVSRRIARGIRRNRDRGQNRVRRLVKELIEFGLFPVDERERKKVFDTVSPYYARAAAAQELVDKETLGRAIFHIGRRRGFKSNRLAGESEESEFKEKISELRNKLEGKTLGEYLFEREKQNQALAKDKKAHDQKPFRFRNGETDFYADRQMYLDEFERIKAVQGNIHLNDEQWAALKETAFWQYPLKPVPKGKCRYYPEENRAHIDLPISHDYRIYQEVNSLRYQSQNIEYSLDDRQRKAVYDYLRSHKTMTFKQMLKLKEQKSPLFPSDAQFNLDVASRNGKLMGNKTLVDFMKKELLGAIAEKIDYVALNGIADLLIEPLEEINGKKVVMETEKVALELKKRIPNLSDEQIENLCNYRFKRDTAGVSRKFMEQINPVMRDQGLVYSDAVAQLKDDNGHPFNHTYGNTGEVLQRLPYYGEVMPESVWGAQPEADKNKSPLERDDDAYQYGKIANPTVHVALNQLRVVVNRVIDKLGSVPAKIHAELTRDLKNSKDAREQIEKQQRKNKIKNDEIRRFLVDELGIINPSRRDFQKVKLWEELGKQGARFSVFSGQCISASQLFNGEVEIEHIVPFSRCYDDGMANKTLAFKNENNQKGNLTPHEAFAGAGSQYSYDDMLKRALSVFGQTSKYERFKEDAYERFYGGEKGDMIARQLNDTKYISRKAHQYLSCLCTQHNVVSVNGMMTAVLRDVWQLNNFKDRATGHYREDHRHHIVDAFVVGLTSRSLINRLNTRRSTVDQTQKDLYHFLKSRVNDIPELKKELFKKLDLVVASYKPDRTQTGSMFNDTAYGIKSTEDDTKYVTRKAITALTEKEVLAIRDSEIRQNLIKHLTGRLTVENLREFKVSLGPGKDFIDKKASFAKKTGINKVRINVPNTSIEAIKSASYKGYGKNSYAFCDVWMIPHKKDKKSGEWLYRFEGDFVAFADAKHHDPESFKVGRHPAMKKLVRIYKQDCFTMTNKLTGEAEHIRIAGYDASKNKLDVRENLKAVNEKQNHISINTLFSNHQFKKLRL

SEQ ID NO: 7 - protein, 1054 aa, synthetic construct
MLKYRIGIDLGTNSLGWAAIQLGSELEPRQLLDLGVRIFSDARNPKDKSSNAAQRREPRGGRRNRDRKLQRSRKLLRNLIQYGLLPEHQTERKMLESQDPWSLRTRALDEPLSPHQVGRALFHLNQRRGFKSNRKTDGDNDGKVHDAIARTHDSLNLHNARTLGELFGRPRLEQMRTNESAPKGSRKPLPLARVRSRGQGAKMVYDYYPQRDMILDEFEQIWSSQAKFLPDILTSEAHDCLREIIAFQRELKKQDVGKCTYIPEYPRAPKALPSVQRKRILEEVNNLRVAATGEASRVLSSDERKILVDFLRLPSSKIGKRTFDRLRKQINLPPSQRFNLESLKRTFLQGDETAARLMQNDAFGKAWLDFDLTMQDEIVLRLLEEEDEDELIGWLQSEHGLNPDVAMRISGISLPDSYGKLSLEAIERLIPRLEAGERNDEAAAAEFGDHRALGDGEIHEDGLPYYGELLNRHTAFEKSDPKNDEERFGRVANPTVHVALNELRKVINDLIRRFGPPTQVVLELARDLPLSDRGLKDLERQQKDNQDSNDNRRKELEKLGVINNYDNRLKLRLYEELPQLNKCCIFSGKPISITDLFSSDIEIEHILPIGESLDDSFSNKVLSTREANRYKKKRSPFSAFGASIDGYDWEQVSQRATDLPPNKRWRFAPDAMDRFTDESNFLDRQLNDTRYIARLGKTFVEGLFGGQGARGQENSVWVVSGRLTSDLRHFAGFNGLLSDDNKKDRTDHRHHAIDAVVISLTDRTMVKRAADLAKREDQVAHYEIMKTMAEPLKRYRKSVEDRLAKMTVSHKPDHGFQDAMHNDTAYGITGQHDEKNQSILVTRKALDSFEKRSQLDAIRDETLRRIFVEATEGLTKSDFTHALIQEGRSQSPPVYTVRVTTPMKDTSFVVIEHGDGHKKAYKGDGNYCYDIWTDERGRWVGEVITTFQAYQKARKNPNWWRNRTGGNGQPLEMRIRKGDMLEIDDPAGRRKVMVYKFSKGKICMADHNEADASGRIRSGELMQTQMAPSSLQTVSAVQISVSPSGRIHRRNHLK

SEQ ID NO: 8 - protein, 1498 aa, synthetic construct
MKRILGLDLGTNSIGWALVNEAENENEKSSIIKLGVRVNPLTVDEQQNFEKGKSITTNADRTLKRSMRRNLQRYKLRRANLIEVLKEKQFITEETILSENGNYSTFETYKLRAKSATEEVSLEQFARILLMINKKRGYKSSRKAKSQDEGQLIDGMEIAKRLYEENLTPGQFVYQLLLDGKKFIPDFYRSDLQSEFDKIFDKQLSFHTEFLSTELKEELRGKKRDAVWAICAKSFKEKGFELVGIKRQGKTYEQKVENYAWRAKAVNEKLDLEQLVIVLQQISIQLNSSSGYLGAISDRSKELFFNKQTVGQYLMAQLNENPNTSLTNQVFYRQDYLDEFNSIWETQAKFHKELTEELKTEIRDIIIFYQRRLKSQKGLISFCEFESRQIEVEIEGKKKIKTVGLKVCPKSSPLFQEFKIWQKLNDIEIFPANEKKKKYKPNAKRLNQEQKELLFKELSGKEKLTKNQILSLLDMQEFDMNFNSIDGNRTQAELLKKYKEIIELSGKKIESNETTDNEINIISKTFNELGYNTDILYFNSDVENLDDEPFYMLWHLLYSFEDDKSNTGNESLINKLMFEYGFDRSSASILASATFQDDYSSLSAKAIRKILPRMKQGEDYTTACAYEYGKHSKNSLTKKELESKLYKNHLEIITKNSLRNPVVEKILNQMVNVINAIIDDPQLGKPDEIRIELARELKKSADERILLTESVKGNTEDIQRIKKRLKEDFPIFKTNEPSRNDIIRYKLWEELAPNGHKPLYGNKENLKKEISPAILFSKEIEIEHIIPKARLFDDSFSNKTLIFSSDNKDKRERTALDYVSQDFSDDFSNYINRIITVFGTKTTKRVNKLTKRIETDTKTFDSIYKEHERSLRNNKKQKEKLAKWDSSSEDEKKKQKKPWDRMSDTERNLEVIEKYYSGKLGKLALSEKDLPEGFINRDLANTQYITKEAKKMLGDLVKFVTSTTGSITDRLRDDWQLVDVMKEINYPKYEKLGLVEDEERIDYKTGEIRYTKKIKDWTKRNDHRHHAMDALAVAFTKRQFIQYLNNLNARRTNEEQGISNTEKEEHDNFAITAEDVVLNTRDVLGIEKNYLYRDKRNKLRFNPPMPLDEFRAEAKKHLENTLISIKAKNKVATININKTNKSGGQNKKQQLTPRGQLHLETVYGSAQQYVTKIEKVGAGFNEEQINKVAKKAYREALLKRLIENGNDPKKAFTGKNSLEKNPIWLDELHTIQVPDKVKTVSTETIYTIRKEISPDLKLDKVLDAKIKNILEARLKEYNGDNKKAFSNLDENPIWLNKEKGISIKRVTITGINNAVALHDKKDKDGKCILDDNGNKQAVDFVNTGNNHHVAIYRDEKGNLQENVISFFEATTRVNLGLPIIDKEYKEGEGWQFLFSMKQNEYFIFPNQQTGFNPNEIDLLNPENYSLISPNLYRVQKLSTKNYVFNHHLETTAVTGDTLKNKKELSNITYRFIQSLPPIQNIVKVRINHIGQIVSVGEY

SEQ ID NO: 9 - protein, 991 aa, synthetic construct
MTKTTLGIDLGTNSIGWALLNEKKEQIIATGVRIFPEGVDRDQKGGEISKNQTRREKRGQRRQTARRRSRKHRLLKQLIEVGLLPQQQDDFYPLLTNPYELRKRGLDEQLSLHQFGRVLLHLNQRRGFKSNRKSDKQNQKETSDMLKEISQLESDIHENGCRTLGEYFYKIQNTDSNDKKQNHIRLRSHHTHREMYEKELELLWQAQQKFYPEVLIDDLYDDVRQTMFFQRDMYWDPKTIGLCELENQKRCPRADRMAQRFRLRQEINNLRLLDESTGEVRSLNAEEREKVYEKLSTTRERSFDKIRTDLGFDEHCKFNFENGKRNKLKGLETDAILSGKKYLGKKWFEYSDQRKDEIVYCIIDEKLGDHDFLDKAQNEWGMDKETAENLLGVNLPDHYMNFSRKAIEKLLPALEEGLPLMTDDKKESAMSRAGYLRPDQRPNKIEDFLPKPPDLPNPIVRQALFEFRKLLNAIIREYGKPDKINIELARDVKNPKKVREEISIKIWERTQLRETAKQEIEKLGEKPTRDNIARYLLWEEQGRICVYSGNNISLAQLMKGEIDVDHILPYSRSLDDSLQNKVVCFRKANADKGDQTPYEWLAEMHPTQYEEVQQRIRKLPFGKRQRFTRKNVELDDFVNRQLTDIQYISREVMKYVRCLGSEIVCTKGQNTSDLRHVWGLNTVLNNENLNIKNREDHRHHAVDAIVVALTDRSRLQQLARSRKRTKGQIEFPHPWPNFRNEAEKHINSIIVSHRVQRKIQGALHKETIYGATKKSGEYVYRKLITDSSFTLNMVNLIRDPVIKDLVIERLKKFGYEPGRGKGTIKKEVWKEPLTMLSGTLIKKVRLIKKNKTIQPIRGGNSHVQPGNTHHICLFKKEGKICKMISVPMIEAARRVKDHEPIIQRDPPPDYPDSVFFMSLSNNEIVMLKHKGVEDIYRFDTSASTSQQMHFIHHTYAVKEKTPAVRLSKKPSTLDARKITVDILGRIRNAND

SEQ ID NO: 10 - protein, 1127 aa, synthetic construct
MTRNNLSLGLDIGIASVGWAVLDSDHIIALGVRAFNKAEVAQTGESLNLQRRSARLARRTLRHRRQRLAKLAKLLEASGVITKERLYATPTRESYPSPWALRVKGLDECLAGEEWGRVIYHICKHRGFHWVSRVEEKKSGENAKQEGGKVKQALKSTRGLFASKKYRSAAEMIISEFPDAYRNKHGDYGKALSRTLLSEELELLFQRQSCLKNPHATDFLKNAVLGKGDKKTGLLWEQHPALSGDALLAMLGKCTFERQEYRAPRKSFTAERHVLLTRLNNLRITIDGARRPLTDNERRCALSLSYERAADIKYSKLRSALEKTCGTPSEFAFVGLAYPSEFQKQEEKAKNPEEAAVFKLPGWHELRTTLKKAGLEDEWKQLTCLALKGDPTLLDQVAWVLSVYKEDEEVVAALDDLPLPNKEAVIDALLSVQFSEFHALSLKALRNIVPKMELGLRYDEACTQSGYDHSQPFDPERQKSQSLPPFYLGHDHLSRMRLNEDVGDLPRNPVVMRALNQARKVVNALVGKHGAPHSVHIEMARDLSRPLTERRKIQKEQDDYRDKNDKNRSFFIEQFNREPRGQEFQKLQLYREQSGKCLYSLAPLDLSRLLEMGYVEIDHVLPYSRSYDDSKNNKALVLTKQNRDKSDLTPYEYLQGAQDTEAWIKFSAFVKSNKNYRAAKRNRLLTKDFDEENAKDFQERNLNDTRYICRYFKSYLEEYLELSDESEHRRCVVVNGRLTAFLRARWGLHKERSESDRHHALDAAVVAACTRGMVKRLADYAKGRELRYVQADSIDRETGEIIDFDRYKKLENEFPQPWQGFRGELLARLNTDDVSTLRASLSKLGTYSREEIEAVKPLFVSRAPQRRNSGAAHMDTIYQQTTRLKDERKISQKIKLAGLSFRQTKKTPKPITEQIEQFVKKLADPHRNQKLYDAVCDRLKAFAGDGKKAFSAENPLYKPDKNGNPTGPIVRTVTMSERMSGIPVRGGLAKNETMLRVDTFSKGGKHYLVPVYVHHKVTGLPNHAIVSGKDEADWREVDETFEFEFSLYPNDLLQICLKKQTHLGYFAGCNRSNGAIHLWAHDRSSKVGKNGLISSIGIQRAKHLKKFEVDVLGNRFLAKAGKRDGLA

SEQ ID NO: 11 - protein, 1386 aa, synthetic construct
MKRVLGLDLGTSSIGWALVNESENSDEQSTIVKLGVRINPLSVDELQNFEKGKSITTNSERTLKRSMRRNLQRYKLRREELIRIFKESGFIADESILSENGNKTTFETYRFRAKAVTERIQLEQFARVLLMINKKRGYKSSRKLKSQDEGQLIDGMEVAKRLYDENLTPGQLSLQIFQSGKKKLPDFYRSDLQLEFDRIWNFQHQFYSEVFTENLKEELREKNKNQTWAICEKPFGIVGIKRDTKGYELKKENLIWRTKAISVQMDLERLAIVFQEINSQISNTSGYLGAISDRSKELYFKNQTVGQYLMKQLDTNPTASLKNQVFYRQDYLDEFNTIWESQSRFHKELTEELKKAIRDVVIFYQRQLKSQKGLISFCEFESRQIEIEVDGKIKLKTIGQHVIPRSSPLFQEFKIWQILNNIEVIVKGKNIRKRELSIVPDDIENLLMNEGRRKLHQEEKERLASELSIKEKLTKAEVLKLLFENPQELDLNYESIEGNRTQARLVEAYKQIIELTGHKIDLKKSAEEMLKSISDIFRALEYNADILYFDSEKPLDKQPMYKIWHLLYSFEGDNSKTGNENLISKLSELYGFEEEYASILANITFQDDYGNLSAKAIRKILPYLKEGNMYDIACKYAGYRHSKSSLTKEEIKNRPLKNRLDILPKNSLRNPVVEKILNQMVNVINAIIDNYGKPDEIRIELARELKKNAKERQDLTQIINKTTTEHKAIKDKLNKEFGLPHVSRNDIVRYKLYEELKINGYKTLYSNTYIPQEKLFSKEFDIEHIIPQARLFDDSFSNKTLESRTVNIEKGDLTAYDYVRNKTDAKGLEDYLSRIEDLLNTGNISKTKYNKLKIQEEDIPDDFIERDLRDTQYIAKKAKTMLESLVRRVVSTTGSITAKLREDWQLVNVMQELNWDKYNKLGMTEIFEDKDGRKIRRIKNWSKRNDHRHHAMDALTVAFTKDVYIQYFNNINARYDKNSNAYAIEQKYFHDRKVVPPMPLDMFRSEAKRYLENTLISIKTKNKVVTNNINITKNKAGTNKKRQQTPRGQLHLETIYGSQKRCMVRVEKIDGKFDTAKIETISKDTFKKALLDRLHLYNDDAQKAFTGKNGLSKHPVYIVDNAGTRHSLPEKVKTVTFETVYTIRKEIAPDLKIDKVVDKQIQRLLEQRLSEFNGDKKRAFSNLDENPIWLNEEKGISVKRVTISGISNAEPLHDRIDKDKNLILDDNGHPEPVDFVNTGNNHHVAVYMDSNGDLHENVISFLKAVTRKKLRLPIIEKNYKSEEGWVFLFSMKKNEYFIFPNKETCFNPNEIDLLDTDNYYLISPNLFRVQKFTIRDYFFRHHLETNVSNDSELRGVSWIRCGLNDIKGIVKVRMNHIGQIISVGEY

SEQ ID NO: 12 - protein, 1349 aa, synthetic construct
MKQDYFLGLDIGTDSVGWAVTDTSYKVLKCNGKALWGVRLFDPAQPAEERRMARVARRRLERRNQRLKWLEQVFSEEIAKVDPAFFQRLRESKFREEDKKSDYPLGRYTLFADKAYGDKDFHRDYPTIYHLRRALIAEAHPFDARLVYLAVHHILKNRGHFLFGDMSIDAITFEASFEKLRQHLLEAYELKLEVSDLDSFSSVLTNRKLSITAKSAKLIELAGLPKEKGPVQAMMQLLAGRKVALDALFDEELPTDDVPSFSLRDDFETVEGKLIEVLGDRIDLIHLLKEIYDWALLAELLNGYRYLSFAKVQSFEKHRVDLKRLKGILKAVDGKAYAEMFRHAKKDLDNYLAYCGHGAKGYHCDADAFYKYLAKQLKAISPQTEEIRNVLQEVECRDFLPLQTTKDNSVIPHQLHEAELKLILKNAAQYLPFLNETDETGLTKKEQILQVFRFRIPYYVGPLNEKSNRSWIVRSPEKIYPWNFEQVVDIGKCAERFIAMMTAKCTYLGEDILPKNSLLYTRFSVLNELNNLRINGKKISVKQKQRIYIDLFLHGYKVSQKRLKDYLLANGIMEKADVISGIDGDFKSNLAPWHAYAWLLNRENGVDIAEDIIRHITLFGEDRKLLERWLRDYYSAALSDEERRQALRQKYSGWGKLSREFLTIIFHVDPNTGEALSIIDALWNTNDNLMELLSGRYTFLEAVKEYCEDNTDMKSGTLQDYLDEHYAAPGIKRAIHQTVAIVGEIEKIMKCSPTRVFVEMAREDGEKGKRTVTRKAELSGLYAKCGEEAGELLEQLEARTEGELRRDKLYLYYTQLGRCMYCGEPIDLNRLDVDYDIDHIYPQSKTKDDSLQNRVLVKRELNARKSDEYPLSPQTRTARRPFWEMLRTKGLISQTKFERLVRASGFTENEMEGFIARQLVETRQSTKIVAELLQNRYGDTSDVVYVKAGNVSVFRQDQRIGANGKQKQAGVCGHNEVTIQDPLFVKCREVNDFHHAKDAYLNIVVGNVYHVVFTKNPLAYLKARDFKYSLNHIYDYDVVRDGERAWTAGADGTIATVRHVMGKNNILYTRMAKETKGPLFDLQIVGKTKGQAAVKSSDPRMTVDKFGGYNKPTGTYFCLVEHTVGKKQVRSLEPVLLMHKALYEKNPMDYCTQRLNLKDPRILISCVKIDSLISFDGFRMHISSRSGNQVRYKNANQLVIASEWQTYFKKISKYLDRCKKAKTDLPVTLFDGITSEENIRLYELLLEKLRTSRYHVKYETAATTVAENRGKFNGLAVPEQCRILMQVLNLFACNVDGADFKALGGKEGVGIVQTSKNLSSYSGHSIKLIHQSVTGVFEQEVDLLAEDLP

SEQ ID NO: 13 - protein, 1106 aa, synthetic construct
MPFRFAFDLGTTSIGWAVYELDPVTWKEQKRGKPVGLRRLGVRIFDDGRNPQSGKSHAANRRLPRTMRRQQDRRLARRKRLEQDLADCGLLPDRGADRDALFSCVDRNGKSSHPGQSCPQSPDADCRNPYRLRARAAAGEVTLHELGRVLWHISRHRGFKSNRKADQGEDDSGLIRSAGKALEARLKSGGHPTYGAYLWSRLQAGEGVRVRPQGDGAEKHYEFYPTRDMLEAEFDCIWAEQTKHHPRLTDEDRDRLRGTIFFQRDLRPVDPGRCTFFPERPRLPRWHPDAQAFLILQQLGHLRIIRETRESRLDPDRHAVLFDALYGGRKMTWSNVRNTLGLTSQDELNLANGGLKHLHFNEVAAALVGTTRKPGPLAARWPEYDTATREEVLKQLAQTESPDALIRWLAGELGLDAGTAAAVERTQLPDGHLRFCREAVEALVTEMRSDVITYSEAVEQAPLLAAADIRHSDARPDSGVDNLPPYNELPVLQRMLGTGTGNPEDPHDVRLGRIANPTVHIGLNQFRRIINMLTAEYGKPDEIVLEAARDLSRSPRERAEVEKRIKANEKRNDGYRKRLEEEDVIGPGQRVGELFLKMRLWEELGRNEADRRSPFTGRPISLADLHSEVEIEHILPFGDTLDDSPANKTLAFREENRRKGKLSPGEAAARGIFDQQTIIDLTKHLPRNKAWRFLPDAMEVYEEQKSFEARQLHATGYLARVVRAYAEALFDKRDPDGVNRTHVWMLPGRMTALLRHRWGLNLGDHNRKDRNDHRHHAIDAAVVGVIDRRMIAGLQRAARAHGAMMLERVLPDPPDPFPGFRDAVHAAAREVRVSHRPRHLTASADGPSRTSGRLHEATAYGLVRDVPENQADRTIGNVVVRKQATALSRKEIGQVRDVKLRRDLLEATEPARAAGLKESEAEKLRAELLADWSRKTGHRRLRILKAENPVRAVHDCAGRAYKYFAPGEVACVDIIDVDGVWKAHPLSVWDANSGQGRAWNDAYPSGRFVMRVHKNDTLQLFDWDDEEEEVVPGSNSIKRVVRLEPSNKRLRLCDLKEAGTLQKRHKDEDDDFRWDLASISKLKLRRARRVRIDELGRVRIIPHGMA

SEQ ID NO: 14 - protein, 1178 aa, synthetic construct
MSKKKSSRYHQQAEQIRNRLNNRPYTIGLDMGVGSIGLAVIALEEIGGRLTSTDPIFTTSRIFTPSTGASERRGKRGQRNSIRHKSNRLRFLWKLLASQNLMLPLSSEAVADPATLRFDDETRKKDPYTLRLKGLSEQLSLPELGYSLYHIANHRGASSIRTFLDDEKSPDDEKLDEQIRETEKLAKEKGLGTFIEVLAAFNENKLIGYRNIDKLKASKVPVPTRDIIENEITTLLENQSTFYPETLSTEFQKKILDAILYENEKIVPEAGNCPYYPDEKKLPKCHFLNEERRIWEAINNARVIIPEQQAKGFIKMIPTPFTEDERKDLFVFLREGKDLTPTAVKRMFEQYKNWDMTLQGRDAKKQKIKGFRFKDLEERPFWKSFSEDQQDQFLYAWVNTPDDKKLKCLLIDTFHLSNDVATDALKTVELIGDYAPIGKTATKLILKYLEDGASYTEAIEKGVEAGELDEVGQWEVQEKLPYYGKILTGSTQAIMGKYWHSAFKEKRDLAGFHKPKTYWEEECYGRIANPVVHQSLNELRKLLNEVIDILGDKPAELVVELGRELKIGSEMRNKISMDQNKREKESERLYAKYCLPNNLGKRYIQHFRLLTEQKFICPYCLKTISIAEVAGGTADIDHIFPRRETADDSLANKVVSHGSCNKEKGKRTPFAAFSSRDNWSQIMHYMATNPDMYAKRKKFEKDEEEYQKYLESRGFVSRFKTDNSYIAKAVVEYLRCLFPTNDLNSVRSLNGRETSILRKSWDLQKISSELGALHILKNKDENELGRKDRTDNRHHALDALVAGYCSRSLIKKINDLSSKGIPAEEIERALPVPGFPETTIETANNQKDVFSKKIKAFLELNGFISLKIDTAVNGPLLKDTIYSILGANEHGEELIFVVKKSVSTISVKEGSLEEVVKAIHGRFSANHPKWYSDELKTKIEGIQDHNQKTITRYQESLQKAQQILEANNEKNKEEGKKPLELSARNISKKALELCGGTYYLLSNNTRQKTFVAKEPTKQTKGFAYDTGSNLCLDLYHNKEGVLRGEIIRNIQAMNKNFIPKYKQAGFSLYERIYQGDVLEIEGTSPVELTEKSSGSDKVASVRTPNALSNRTFVSVVTFTETVSGIQAFFSNICKSRADKDASFSLGSLIKLNARKVVLSPAGLVAYVSRPLLDIPKEE

SEQ ID NO: 15 - protein, 1068 aa, synthetic construct
MGRSKNGAMQRYRLGLDLGTNSIGWAAVTLDDDGQPCGVLDMGVRIFPDGRNPTDKTSNAATRRVARGARRRRDRYVQRRSNLLKALITYDLMPTDYNQRRQLATRDPYTLRAKALDHPLPPHELGRALFHLDQRRGFQSNRKTTGDDDDAAKQIGPKIEGLNKSMAASGARTLGEFLARQLEQGYAARFREGAEFYPERAMYKAEFAAIRAAQERHQALSAAQWDTLHEIIFYQRDLKSVEPGWCRFEHQEKRAAKALPVFQEFRMLHEIGNLKLHVGSEPERPLNDGERERALERLRAGKDINLKKPVKALGLPAGATFNLGRGGVRTIIKGDEATARLVEQRKKGQPTQTLFGKRWLTLSLDERNEIVRSLLDTEDPAVVRRKARENWGLTDAQAQAVSAVVLPSGYGELSEKAIKKLLPHLERGLRYSDAVTAADYLHHSDFRNAEAHERLPYYGAVLERDAVGADPTKDPQRDGEVARYGRIGNPTVHIGLGQLRRIINKLIAVYGKPEEIVVELGRDLKANKDDRDWYRRQQREGKARNEKYKEWFGGVEPRPHTRLKLRLWEEQGESQARFCPYTGKRLSFEMVISDQTEIDHILPFSQTLHDSLANKVVCLATANRYKGNQSPYDAFSHNPPGYEYQAILARAAKLPDKKRWRFQPDAMQQFGGKRDFLERQLNETRYLSRTARDYLAYLYDEQTERRRRVRAVPGHMTALLRRGWGLEGMLRESKDGEPSRKQRDDHRHHAIDAFVVACTDQGLLQRFAEASNSRHDRAARLPAVAGEAPPWEGFGRSALRPFLDRLVVSYKSAAGAHSDQTTGQLHNETAYGLLEPAGAGPSKVVTRKQLSAVKRKDLEAMVPGQPLQAALLALWDQVAAEGKKPADFAERAANKGVLVKGQRQRVRRVRVVDKQTVIPIKDHRTGKPYKGYRAGGNEFADIWQLLDKTETWKLVAVPTFDANQPKFDLDKYRPHPAAKRLIRLRIDDMGALGEGPERRIVRVRKITNAQTGVLVFLDDHNEANVPDRVRKKEMKSNPYSARQLKQQGFRKVRVDELGRVRDPGPRAP

SEQ ID NO: 16 - protein, 1533 aa, synthetic construct
MAKILGLDLGTNSIGWAVINVIIEDGKVVKYISIDDTGVLIFPEGVEPTTIGKGDKEQSKNSTRREHRQNRRQVYRKKVRKFKLLQSLIGLNMCPLSIDSLNQWGKWKKTEKTEGKKFPSEPEFIKWLKLNPYELRYRGLSEDLSLLELGRVFYHFMQHRGFLSSRKGGDEGAIYKGKDNMTGINDTRNLIGTDTLGKKLYEILPKEGEEFHYKTDANGNELRVRSRYTERGMYIEEFLKIWERQTAHLGLDNMLIKSSKVRFLKGNLESNRNRKKINNYFDKYGKENVEIAGGKVTTYKEILLKTFLAGEIESGIDGIKFKSNESLLFWQLPLRSQKNLLDNCRFEQNRPVLMGNGDFRRKNGEIVYRSKKPCPLSHPEFELFRSYQIINNIKYGKGERLTDDQRKLVLDVFSTKDNSFKFEQIVKALKLTYEEFNYDLDQKISGNPTIKKLKPLFPEEVWNRCYEKIWHCFYFYDDNVRLLKKLKEDYQLKNSFDIEKIKKIRIAEGYSNVSLKAIRNINPFLAKGFTFSEAVVLGGIKNAFGPRWEFFNIPDIIGGLESDVLRILHEKGNKEGEAINKIKDYLSDPLNNYGFSENDPAFTQLYHHSQEIENRDIEDWVPELENLRNPIVQQALYEMRRLVNELLRKYRKQDPGFIFSRIHVEMGRNLKNTKSKRQEISVKANENTNKNENARQRLAELGQRPSRDNLLRYLLYDEIQKHSSGPVLCPYTGKVISVADLLDGTNAVQIEHIIPKSISLDDSFSNKTLCESKFNNLKGEKTPFEFYLINHDYKLWGIQKHDNIKDGWNEITERVYKILPYAKARKFSSKNEFKVDDFIERQLNDSRYISRKAVELLSSICSDVRMLPGQVTAELRHLWGINNILNPVCGMQDCEVEVKAGKRLAYYVLTDEHRKVKSMLRKTNDRPTTNSNQLVLSGILNKNVLSSKYLSLKINVPNMIDGKYWVLVNVSDKTSLFPVFAKKPVSDLDHLVLKGRVEKGFFKNDTIGNNIKVKEDRDGAYWARFSVKKFELKIAENKGKVKTKTSEVALFGEVKNGLFVCHIYQCKTNLPDGKYWAFMQLDFEGFELMRVKNIKPETNQNQILGYVTVDENENMVADIDPAYSKRTEQNPGRYYCVFNIESIEQDLYPMENDPPKPKKGEVLTEAVVWVDEATGEIRYDPKKNREDHRHHAIDAITVALTEQGFMQRLSTYYAKEENKNRSLDNSEKFPMPWDGFEKDVKKFAESILISHKQNNKVLTRISKKIEKNGVIYKSVGFSARGQLHKDTVYGKRTPPGHKEAYHVRKPITSLEDKKQIGKVVDGVIRNLILEHLRDNCGVDISNDSFKVPKDAFFKNGKPRLFLPNRKGGEPVPVKKVRVRENFGNAHNLKSSVNQYVDLKNNHHALIYLKYDGKLGEAMVSYWEAVERQKQGAEVFRLPADGKESIAILQTNDMFLLGLSNEEFENNKNNPAFLSKYLYRVQNISSKDYLFRHHLASIVTNKNDQYRIQSFKAFQKANPIKVLIDKLGSIDSIE

SEQ ID NO: 17 - protein, 989 aa, synthetic construct
MSDITLGLDLGPNSIGWALVDESREKLIASGVRVFPEDVNHEPNEADETKTKHRRDKRLARRQTTRRASRKKHLKKLLCGAGLLPVKDTDLHALLENDPYDLRRKALYERLQPYQIGRLLYHMNQRRGFKSNSKADRARKKETSKMLEEISDLQEKIGSAGCRTLGEYLAARRLDPHERVRGKHTRREMYEEEFDAIWNAQQKYHKGLLTPELRQKIAGTIFFQRDMYWRTATIGRCELEPGQRRCPRADRHAQRFRMLQEINNLRLLDTSTGEERRLTEAERTELIKYLSTQKTRTFKDIKKKLGLFDTCSFNLERAECSSLKGLETDAMLANKNIFGKDWWRLDDGLKDEIVAALIDEKSEYDDESLLEIAQQKWKLSLEAAERLLDINLPSGYMNFSRKAIDRLLPHLENGLVLMSNDETPSALREAGYLRPDQRAIKSYRFLPQPPDLPNPIVRQALHEVRGVVNAILREYGKPDRIHIELAREAKGSFEDRRQILIKNKEREKKRDEARKSIEEHGRKATRDTIDSYLLWKEQKETCIYSGKPISISQLLGGEVDVDHILPYSRSLDNSLMNKVICFRAANADKGDRTPYEWLAESDPDAYEKMLQRSRNLPYGTYNKQRKFLQKNVELDDFINRQLTDTAYISREVVSYVKCLDVKDVLCTRGNHTANLRRLWGLNCILNPNWEDFKNRDDHRHHAVDAIVVALTNRSRLQVLARTHGHDMEPPWGSFRADVEQAINAINVSHRVQRKIRGALHKETIYGPTNENGKFTYRKELENLTLSMVDEIRDKTIRGLVIERLKKHGIEPGRGSGSSIPAAVWKEPFLMPSGVPVKKVRLVKTDETIQPIRNGTAYVKPGSLHHLCLFKQINEKGKLVLDAVFITTLEAAQRAKRGEPIIQKTHPQNPTAQFVMSLSMNEMLILEHKGKEELCRFISAASTSKQMWFRIHTFAGKSADRRGQISKKPNTLKARKVTVDRLGRIRWAND

SEQ ID NO: 18 - protein, 1093 aa, synthetic construct
MSISFSFDIGHSSIGWAALKVDSTEPEVLGCGVVAFQPKDCQNQKRAGFRRQRRHIAATRNRIKRLEAFLQKAGVLSAADVTYCRENPHPWPWLLAAQVLRGERKLEERELWAIIRWYAHNRGYDGNALWAGEDADKDDIKKVKAARDLMEEHKTNTMCETVCVFLDADPTSTANPNLKKYFKGENVAFPRSTVIAEMRKILKTHVGELANITEPFIKALLDDWKCSKVAGFDAKLPQRYFGGLLFGQLKPRFENRIIPKCRLTGEKTPSKHSREFYRYRWAMFMNNLRVASDQGLPPRPLRVAERCALDKIMHEKGYLIKSDLTKALKKSLKLEPVNLEAMLLVPEMENALTLDPALREVSGNKHLKKVWPLVPDERKRVFLNQLFHSRNFRGKPPSIGQWKIRLAEDGAAIEKFDEVFPEIFEAESEKLAKKNLTLTQQEFLDRPIHLSKRASGRAPYTRKKLLDAVACVMRDEDPRSHGGPLEETEEARSRQQNESIDRNSNNHLVRHRLKIFTRTLDDLVKRYANDDPASVAWVGVEVIRDLVQFSGKTEKEKAKILSDQLSHHRKIVKILEEKRESTGGNWEINIGLIHKVRIADDMGWKCPYTGNDYNLNNIIHGKVELDHIIPYSKRPTNALHALTLTFPEVNRQKGARTALEYIEDPQNEPPHSPNQFKKFVENLKKKNGPSKDDEMRCRKRKIALLTPHYEKYGKGAGTNEADEGEVVDGFTEGSLSQTSYLNKLAVQETSRWFTECLGSEVNSPPVVQLPGSVTAATRRKWKLFGQLNEVCPETRNKAKADVRKITHLHHAIDAIAIGLAVHYFPKEDGRLHTLLSRRSIRNPDDQAYLKKKLGDLICFCNNGCWELRDLSPCVKEQISERLLEKKVVRHIPRTMRGLRVQENIWGVEGEDPDDDTKLRISMKSRGEDGKKSKSKNKSERKTKLLGYRPNEASEGKLKQLKGVLIVEYNFGVALDPEPKVISYQQVWKQISELKEANKGRPVRIIRNGDIIRIPRGQRYKGVWRVHSVKDKAIGPVLNLASPEFVNLERTLKMDRERESEDGNNPRAKEDVRLRTLLKDGLEILNCDYAGHVR

SEQ ID NO: 19 - protein, 1089 aa, synthetic construct
MNTEVESSTLYRLGLDVGTNSIGWAAISLDGDGKPCGILDMGVRIFPDGRNPTDKTSNAVNRRLARGQRRRRDRYLKRRGKLIKTLIEFGLMPAGKEERGSLAKSDPYKRRAGALDRDRPLGPFELGRALFHLNQRRGFKSNRKAGGDDESEAQTTRAEIDALRKSIRESEARTLGEFLAERHEKGKKGEKDGTVRARPGHELYPDRALYEAEFDAIRCAQKPHHPNLSDSQWDRLKDIIFFQRPLKPVDPGWCLFERGEKRAAKALPIAQEFRMLQEVNNLKIVVGFEPERPLNDEERARALERLRAGNPINLEKPTQNLRLPVGATFNLSIGGRKSVKGDETSARLVTAKKEKGERKAKDIFGSRWHALSLDERNEIAGFLIDTEEPEAVRQKAREDWGLNDAQAKALSEISLPDGYANLSEKAMRKLLPHLESGLVYSEAVKAAGYSHHSDFREGEAQDSLPYYGEVLERDAVGADPTKDPEKDGEVARYGRIANPTVHIGLGQIRRVVNRLIEVYGKPEEIVVELARELKLNRDQIRELERRNREGGERNERFREMLESAEQGLSADTLQRLRLWEEQGPEHARLCPYTGKPISFEMAVSSRTEVDHILPFSKTLDNSISNKVLCLAGTNRTKGDRSPYEAFGHNPPGYDYQEILAWSDKLPDNKKWRFKEDAMERFDDESAFLDRQLNETKYLSRTARTYLSHLYDEKTSGRQRVRVIPGRMTALLRRGWGIEGMLRESENGEPPRKSRDDHRHHAIDALVVANTTQGLLQQFASASASADSADATERLASMVPLPWDGFHRNEVQPFLDRMVVSYKQDHGTRGGLSTTGQLHNATAYGLIEPLEDGSYKVVIRKNLDKLKKKDLESDAIRDPLLRKALLRLWEEVESLEGKANPAKFAERANTKGVLIAGKRQRVRRVRVVDKQRVIPIKNESGKTYKGYLPGGNEFAEVWRMLDGKWKTVVVPAFEANQPGFDPTKFRPHPAAKKLMRLQIDDMGALGKGESRRIVRVRKIDAGSGGRVVMDDHNEANVPDRIKQDMRMRRETGVDTGMKEEVFSAQKLRRLGFRKIGVDEIGRVRDPGPLK

SEQ ID NO: 20 - protein, 1060 aa, synthetic construct
MKNTLGIDVGTNSVGWALINENGIIDTGVRIFSEGVNRVKGVEESRNVKRREARGIRRKLFRYKLRRELLMRKLDDLNMYPEHFTETPAELYELRAKGLDERITLFQLGRILLLLNKRRGFKSNRKSEQSEEAKSKSDYYKELDELNEKIKLFGCRTVGEYFYTLFKQGSQLNDNTYEANERIRARFVYRDNYITEFDLIWDKQAEFYPDTLTEKNKIEIRDNIIFYARPLKSQKHLVAKCRFEPKKRVAPKSSPQFQEFRIWHTINSIRVDDKKEIHRKLEQSEKLKLANFLMVNSDISHAKIKKILSLESSASLNDLPPKIKGNTTYSKIMQVVGTDKFNSLSDRELFLIWEKLYYAHDSEWLVNNLQAKHGLPLDVAKKLANVALEQDYGNLSTKAIGKILKHLKQGKEYNKACEEEGYRHSDYFLEGEERPPLTEKILVSNNDPVLSQIMSPLVKRSVTECIKVINAVIKKYGKPDIVRIEMGRDLNMPKDIREKSHRNNRDKRALRDEYEKFLKEKFHFDRVGKSELLKFELWLELEHSGAELSKLTSELSSDDFRRFSRNVKPSDKEKFRLWLECGRISVYTGKVISVERLFSPEYEVEHIIPYSVSFDDSFANKTLSERTFNRDKGNKTPIEYFAENEDELRKFKQRTTKFGNAKKERLLLEEIPDEFRPDQLNNDRWVAVALKKKCLEAIESVEVTNGAATAKLRRYWGLNTIIKSEEDKKSRDDHRHHAIDAIVIAYTSIRFLQQISRYHSLRIHDKVIQDRFEPPFEGFRNEVVKFVSSILVSHRKDKRLLSTKNNKYYHRRSGSREHQKGIMSVRGQLHEETIYGKILDPYSGREEYVVKKQLSKLTPEQVDKIVDKPIIELIKETAELTGKSIKQVLNEDLVQYNEAGKGVRIRSVRIKAVHKPQSIIVKDKNGKISERNVMLKNNYCANIYANKKGKKIMNIISFYDAVNRKIRNQSLIDDFPELEYLFTITQDDYLLILDENIDDIPDDKDYIFNHLYKIRKFTGNEIGILHHCDSENKNLWRMNCSKQKYIKVEVDILGRIERRI

SEQ ID NO: 21 - protein, 1055 aa, synthetic construct
MKWRLGLDLGTNSIGWAALKLSEDPTDCSKLACSELLDLGVRIFHDSREPSSNGRVGESLAVQRRMARGMRRNRDRTLNRYRKLMRLLIEFGLMPDNRSERKSLKYLNPYQMRAEAVARVISPYELGRALLHLGKRRGFKSNRKTDTDDKETGKIKEGIKELRDTLEGQTLGQYLWKRYQDNLSGEKSGKVQGIRFRAEDPFFPDREMYAREFDAIRSIQEHAHNLSHDQWDRIKEECILFQHPLKPIERGRCNFFPDEYRAWTDTPIAHEYRIWQELNNLQWRDEEGISHGLMAHQRDAISELMFQQNEVSFSKIKKLKDKEGKLLFPDIVEFNLESEKRKGLKGHTIAARIAKDPTLNSLWRILGNQWNEVFETLHQATDDEEAEKNLERIYSFSPEQIKSLLSFHLSPGTQNVSRKFMEKIIPIMRDQGIRYDEAVLEVTDDDGNPLHHSLSTIKAEYDFLPYYGEILKGALYGGHPEKCSPEENPEVHFGKIGNPTVHVALNQLRKLVNTLVERWGKPEQLHVEVGRDLKLPKKLREKIEREQAANQKENETIKAELEKGGIKQVSRTDLIKYRLWEELGKDKLLRTCPYTGKTISFSQLINGDQVEIEHILPFSRTLDDSRANKTVSKTWANKLKGNKTPYEAFGNNQHADKGIVWEEILERAAKLPQNKRWRFFPEAIHRYEKDNSFIARQLTDNAYISRVSAKYLSCLVPYNKIVMMSGQMTGMVRGKWRLNELLPKPIVDGKVDDNWKSRDDHRHHAVDAFTLSLMDRSLLQEISRISGRRPTGIFDIELPLPDTGLVEKAKQRLSEIYISYKPDHGHLGRMFMETAYGVVDEKLLDPEFPDYNLVTRKEVFLLSDKEILHIRGKALRTRIQQAVRRGAEKGLKPAESLKRFSAKTGIKKVRVWVSNKSAQNIPSAPWKAYAMESYVCCDIWRIPKGKPGKWKKNDYKWQGVFWSYAETVGDDPDKNLKKPHPAAKFEMRLYKLDTVMTGEGKICRVAGYHAFQNKLDIRPLNKTDSSQNFISINVLGSNGLKKAIITVDGRICSSC

SEQ ID NO: 22 - protein, 1057 aa, synthetic construct
MSDYILGLDLGPTSVGWAAILIDKDGNPTGFAQIKNGQESMPAIGVRIFEAGVENLGQGSQEKPKNLDRRVSRSTRRLLRRKRGRYLRVKKLLQENNIIPTQKESMDLLNQKDPYELRDKAITKQIGLDELGRIILHITRRRGFKSNRKTPDKDASMGEIKKGINRLKEDSKEKTLGQFWYAQIQDKPLDPIRNRQGGYHWVAHRDQYIEELRTIYEKQKNYYPTQLTETLYQKLNQTIFFQQTYELSKRKKRKVIGMCSLIKGQRRCSLADRRAQEFRLLQKINDLKIIINGKEYPLKKDQHQILYAYLMEHKEAKFDKIRDLLNLPDDVRFNLHYKTNDKILGNVIDSYFCGKKIFGCKQWKTLEENEKEDIWQYYIKEYLSDHSDLSADELKSYYEKKYGLTVKEAKAFDSFMLPMGNVSYSAKVLDIILPDMRKGMGLYDAIQGKFKKKWRCLKELPLPIKANDFHSTNPIVVSTLHQVRKVVNGLIRELGKPREIVLEMTRDLKANAERRAEIQKDQKHNQDERKSCEKQIRIEFGYDETVAISTRDITKYRLWESQKHLCAYSLKRIELSELFTRNIEIDHIIPESMSLDNTMWNKVVCFAKENQDKGQRTPIDWLGEQSERFQTLMVAIKKGSLGNDTRKWERYSIRAKDITDKYTPERLLRDTSFIATLVRDYLKRLYPHHTADQCVRTTKGGVTAELRNVWDINPILADGAIDKKNRDDLRHHAVDAAVIAVTSVGMIQKVTRAWQQIWPRRPYASGNIPFPWPSYVDDLLKVVAGINVSHRVQRKVSGALHKDNIYHLETNGPNAGKYTKRQPLNKITRKNAESICDRSLREFIIKHLEDHGNDTIRAFAEPLLWHCKDGREVMIKSVRCNTDYKSLLKIKENAYVQSDKNHHIEIFRGKVKGKVEYFHKVYSIWEVSQQLLKMRGKRSQGETGRAIITRQKPCPDNLEVSDMEFVMSLAKGESILIDDKKVENQQILARVRDFNSGGDSLSSVELNIVGHTLARVEGKIVKDTANAYRLRNINELAKLHVRKVSVDPLGRIRWAND

SEQ ID NO: 23 - protein, 1334 aa, synthetic construct
MAKILGLDLGTNSIGWAVVEKEDNQFSLLDKGVRIFQEGVKIEKGIESSKAAERTEHRSSRKIKFRRKLRKIETLKVLSEFGYCPELSKEELDLWRYKKIYPNNPALRNWWLTDDKENKHPYYYRHLATTQKFNLNIESDRFKLGRSFYHMAQRRGFLSNRLESTKESNGLEEEKGELTLGEYFYQKYEKGEKIRDNYTHREKDYLDEFNRICDFQNIPNKIKDKLLKAIFYQRPLKSQKGLIGKCVFEPNKQRCSVSRPEFEEYRMLCFINNIKIKTPDDEKLRFLNNDERKKVISRFFLQREHFDFEDLAKQLAPKKQYKFYKDRNKNPEDWLFNFSMKTTVSGCPVSARFKELFEDIFMDKQFNYIKDETGNTPKIIVDTWHALYTFDSDDRLKEFAHKHLNLNNEQIDSFLKIRLKQDFASLSLKAINKILPYLREGLIYSHAVFIGNMEEAVPNNIWNDKENQLLIKNAIKDIINNHNDETTIINIVNGFITNAKRENTTWSEESKAILLEELNNKIIQTFGKYRFESFSEAKKTHLTERANQLLIENMPKNYGKGEHIKAQRIDEAVQTFLTDNFGKVNTEKIYHPSAIETYKPAKRADDGNLYLGSPMTSSVRNPMAMRALHQLRKVINELIKEGIIDTDTKINIEMSRGLLNANERTALRRWQDDREKQRKEYANKIKEHFGNNYQPSEDEILKYQLWIEQKGVCLYSSEENCQINIEDFLGNNPSCDIEHTIPRSLSYDNSQENKTLCKNEANRKIKRNKIPYELSNHQEILLRIEHWREKIESLDKQIEITVKRAKGASDKARKDSEIQKRHYLTFERNYWRNKYNRFTMKDVPDGFKNSQMVDIGIITKYSRLYLKTIFNKVYTVKGSTVADFRKMWGIQNSYEKKARVNHIHHCIDAITMACMDKSNYETLAKFYHDSENAFQNNSSSKPYVEKPWQSFTEDILSLENEILVSHYTPDNLPKQSKKKLRKRGKIQYNESGEPKYQQGDSVRGSLHKKTFYGAIEREVINKKGESEKVIKYVVRKSLASLEDNNIKNIVDDRVRNIVIEARKQEKEIQKQIDALTKKRKKAEEWEEVEIDETIANLKIQIEQLYTLPNKNGNSIPIKKVRVYQPTVTNPLNIKTQRDKSTKSKKEYKEHYHVANDGNYLMAIYEGKDENGKTVRDFELVNNLNAGEYFKLSVQKDLEGQDLGKYEGLIPKSKLTKKIQIPLKAVINVGTMVILWENTPDEVWDLSIEEIKKRLFKVNGLSILTIQKKYNYGRIYLKIHNDSHPSTELKEHSGEYKSTDDIFPFRMILHNQLNALIEGIDFTITPLGKLIKIEH

SEQ ID NO: 24 - protein, 1072 aa, synthetic construct
MGYILGLDIGTNSIGWAILRDRSIVDLGIRIFPVGVKEDLYNKSGTEESKSSARRTARGIRRLYDRYKLRRRQLKKLLLSLDMMPPEILSLSSRELYALRAQSLDERITLQELGRIILLLNQRRGFKSNKKEKGSSDQKKELEGIKLQMEELEMKIASSGCRTVGEYFYSLFTDQSSQQNWHNTDEPVERIRKRFVFRKTYEKEFDLIWSKQKEYYPDVLTEGNYKKLKENCLYYQRPLKSQKHLVGKCRFEPQKRVAPKSSFDFQEFRIWQFINNLRITGGNRFRESLTLEEKLRAAGVLQDQQEMSVAKLKTELNLPKSYSFQKDLPQKIKGNTTNAKLQNALGKENFDSLSGDVKYKLWHTLYFANDEEWLEKYSQKDLKLTPEQTKEYMKINLEEEYGNLSVKAIRKILPFMKAGFDYAQACEEAGYHHSFDEVEDGKERELKDKIERNKEDDLRNPLVQQAVAETIRLVNEIIKEYGKPEAVRVEFARQLKWTRERREKYKSQNDEKERTRDTYREFLKHKLQMENVSKSDLLKFELWLEMEFSETELEKITRSIDMTEFRKFAKHVKPGDKQKYELWLECGRISPYSGKVINLHALFSPAIEVEHILPFSRSLDDSFGNKTLCEREINAAKGNRTPFEYLGENPYEWQKFLDRVKSFSEGKQAKFSAKDLPADFISQQLNNTAYIAKQARKKLKTVCPDVTVTNGQATSFLRRLWGLNTILNPKGENVKSRHDHRHHAVDALVIASTTPADIKMLSDYAKFDASGKLTLRDAPTPFLEFREQAKELLSTVFISYKNKKRLITTKKNKYIHSRKDCSTANISIRGPLHEETFFGKISNPHTGKEEFVIRKPLVSIETEKHIAKIIDPAIKALVIKHVQEHGGNIKSAMAIDLFMTSKSGKKIPVKKVRMQESSEDLIQLRPNENNKLFVSSGSNYLMAIYEKEGKRTFENVSFYEAVQRRLKGLPIFPIEKDGKAFLLSLTQKDLVVVYENDPDEIDWENKAQLFESLYLVRKFDRNGNICFAKHNLSNVNPDHPKDYPSGWVLKKSSNRLRAIKVRISITGKLIRI

SEQ ID NO: 25 - protein, 1051 aa, synthetic construct
MENIAISEDLVLGLDLGVSSIGWVVLDKKNKNEFTRIVDSGVRIFEAGMDGDISSGKADSHALARRNARQIRRQTQRRARRSRKVMYRLQEMRLLSEGTVSDIIPPLDKELAAKYQDVFDGSKELTLSNILPYWLRKRALDEKLSPYELGRVFYHLSQRRGFLSNRKSAARDNEELGTVKEGINNLWKEIEETRSRTLGEYFTTLNPHEQRIRQRWTHRDMYRQEFDAIWASQKGYHDCLTQETYKTLSHALFHQRPLKSAKHLVGKCSLEKSSRRAPYASLEAQEFRLISMVNNCTVITPDGEIRPFTDEERNTLLEHLRTEGDITFNNAKKLLGFKARSTHFNLEEGGETRFVGNRVNASLKGIFGDKWLDFDNQKKNLIINDLRCVRQSLCLFERGINVYGLDKEQAEKFAELELEDSYCNLSRKAIKKVLPLMQTEKMTYAEARCKIYGESLQAGEPLNIIRPVNKFSDIRNPVVSRVLTETRKVVNNIVRKHGKPGRIRIELARDMKNSASQRQAIAKRNRANEGNRKKIADRIIANTNIKNPRRDDILKVQLADECDWICPYTGKQMCWNSLFGSSPSFDIEHIIPFSRSLDDSFANKTLCDSHYNRNIKKNRGPGEYVQPGSDQWDTIMGAVSRFSGDKKVTAEKLRRFQLTTKHIEELTEEFPSNQLNDTRYASRLACEYLGELYGGQVDAEGIRRIQAAKGNITYYLREAWQLNHILGDGVKNRDDHRHHVVDALVVALMTPATIQRLTNAAVQNYERSTNKGRFKMPKMPWDNFWEDAKNAIDDIIVSHRVNHKVNGPLHQESNFAPVSVIENGKVVNETHIRRELAKLKINEVNKIVSSVVRSAVKAKLVELDTDDPAKAFSDPANHPCMKAKDGRMIPIHKARIKISASPVKIGQDRRERYCTTGSNHHMEIFAILDDQGKEIKWDAAVVSTLEAMRRKAKHQPIVNRDHGPSTKFKFSISPGDTFCLNKPKFNMPKLVHIRCVPESQQIMFCALNDARKQADIKKAKEWFSSKVRPFKELEPEKVIISPLGRVWTAND

SEQ ID NO: 26 - protein, 1058 aa, synthetic construct
MTKSNWNKYRLGIDLGTSSIGWAAISLDERDNPCAVLDMGVRIFPDGRKPTDESSKAVDRRIARGQRRRRDRYLKRRAELMQALVDYKLMPLDKNSRKELEKLDPYALRACALDSPLKPYELGRTLFHLDQRRGFKSNRKAGNEDESEEKKLSAAIGEMRRRVEESGARTLGEFLARRHERRETVRARTDLGIYPDRAMYESEFDAIRAAQKPHQRLRPEQWDRLRDIIFYQRPLRPVDPGLCSFEPGEKRAARALPLFQEFRMLQELNNLTLQVGAEPDRPLDERERERALIRLRSGKGIDLQRPTKSLDLPSGATFNLSRFGRKAVKGDETTFRLVKDELFGVRWIGLSLQLRNEIVRFLLETEDPDDVRRKAAGEWGLNEASANAVANASLAPGYGNLSDKAIQKLLPHLQQGLVYSDAVIAAGYTHHSDFRNAEAHDRLPYYGKVLVRDAVGADPEKNPEKDGEPARYGRIGNPTVHIGLNQLRRVVNRLIDAYGKPQDIVVELARDLKMNLVQKQQLRRQQQAGFRRNEDFKEMLKSAGIPVTQHTLHKLQLWEEQGPPQARVCPFSGAHLSFAMVVVSNQTEVEHILPWSRTLDDSPANKVVCTIKANRDKDNRAPHEAFSHSPPGYDYQAILDRAANLPGNKRWRFQPDAMERFEDEAGFLDRQLNETSYLSRTARAYLAYLYDEKGEGRVRVRAAPGRLTYLLRRGWGLEGMLRVTETGEIVRKQRDDHRHHAIDAFVVANTTPALLRRFAQAASSKHGNVVERLAALTPPPWEGFDRDHLRAFLNRLVVSHKPDHGKRGVMGKTTGQLHNETAYGLIELSADGPSKVVTRKDVSAFKRRSDLDSVRDPALRRSLQEPWDKAGSKPAEFAQQAANEGVLLNGRRQRVRRVRVVENLRVVPVRDSEGRPYKGYKSDNNEFAEVWRMRDGRWRIVVVPTFHANQPDFDIEKFRPSYRGRIDPTAKRLMRLQKNDMGALGEGPSRRIVKVRQVWAGTVILDDHNEADVDARERRGEVDRNKNSYSAKKLYERDFRKVGIDEIGRVLDPGPPKP

SEQ ID NO: 27 - protein, 1074 aa, synthetic construct
MRKYRLGLDLGTNSIGWCAVQLDFEGRPSDVLDAGVRIVSPNEEAGRDPQSKTSLAATRRQFRGQRRRRNRFTRRRDRLLDLLVRAGLMPQDAQARKALERLDPYFLRQEALDRVLEPGEIGRALFHLNQRRGFKSNRIADSGDDERSAMKLAVKALEDRLESEGARTLGEFLARRHGRDRYGRRDKGAAARPVRFRADTDGGKALYDLYPTRSMVEQEIDAIWHEQKKHHPRLLTDELLGKIKRIVIEQRPLKDPIAGNCSLFPSEKRAPKAHPLYQRFRIMQDACQLRVIRRGQAERPLRVSEFELIVGVLLKRSSRIVEFEKLRRELKLPDDARLNYERSGRKGFQCDETARVLAAKRTFGAAWRRLDLDRQVEIVERLLEDQDEVALCDWLQAELELDAASAEHVSGIRLPQGHGRFSIAALRRLVETMGRESREAHDPATGEVYRRPLTYDEAIECLGYHHSDRRPGKLHERLPYYGKVLEEHVIQWPNAPKGSHEAIGRVSNPTVHIGLNQLRLVVNALIDEYGPPEDIAVELGRELKLNKERKERLDRQNRENERKNNEFRDTLSELGLADTYDNRMRLRLYHDLPALSRICVYSGRPISVSMLFSGEIEIDHILPYSQTLDDGFANKVLCLRKVNRKKRNRAPESVWTGKELADICERAESLFPKKAWRFAPGAMQRFEDEGGFLARQLTDTQHLSRLAKAYLENVCRSVRVFPGRLTAMLRARWGLDGLLSDHNRKNRNDHRHHAIDAFVIACTDLGLLNRIANASGKAEELNLERLFPKDAFPIPFEGYHKALDARLQMLVVSHRPDHGLRPGAGNDVHMTSGQLLDGMAFGQVDEVVDGKRYNLVRRRPLRELTAPMILRIRDHGLRNELAMVAKDAKLSGRRLEDVLLEFGTARDIRSVRVLETKASVREVRHIRSLDGFGFRKAYETADNHSIEIYRLPNGKWQGEGVTVYDANRPGHEPNWRKTYPDARLVMRVHRGDFIEADLGEGRRVYRVVQLRPSANKVFLAQHNEAGSLQKRHKSSTEEDPFRFMMPVYSTLKTAKARRVRVDPIGRVHRVKARR

SEQ ID NO: 28 - protein, 1246 aa, synthetic construct
MKNKNKNPYILGLDVGSNSIGWAVVDCIKEEGDHKGIYAGYKPTSLRALNSRIFLEMVEAKTRVPKNQKRREKRGARKRRSFYKRRREKLVRILIDKRLLPEDYRQCPEKTLNQIDRRYGERKVGKHWSKTWSVTEKAHCSPYAMRNFALEENLEPFEFGRLLLHLQRRRGYFSNRGAKYIELIKHLSLDSPEDGQESMSVEEKKETGKVLQAIEKLHEELEGSTLGQFIWQKSQKHQKPPHRITLFEFEKSRTHKSETRIERLQFRAKREMYEKEFDAIWEKQSNFHDLSGQKHEIKHATFYQRPLQLQKNAVGNCNIYPHKKRSALMRLEFQEFRTLQMINNLKVDGNPLSGEQRNKLWDAANDPDKLNESGRIPWKEVARILEIKRATLNYETNEDGAGKTGLIGNKTAKAISASIGANKWRELGKDKQIKLVEDLQTIHNKKDLYYRLVTHWKFAPYQPGDNKKEKGALGLTMDEELEDGYGKHSLKAINELLPHLRDGLDYYKAVEKIGHRESITPNQRKTEDDYVLSVADVPNIANPVVQKALYEMRRVVNSIVKRYGKPVIIRMEMAREMKSSKKHRAEIASQQKKNREDNEKAESEILDYWQNGKNPHIELEQLRNNRARVSRNDRSKYKMWKYEQDEKCPYCQRPIGPNQLFSGDAEIEHILPYTGFRQNYLNTLVSCRACNQRKGQQTPYEAWGSDPDQWERIEEFAKGKYVRELYGKQRRILEKKHSPETVDDFVERQLNDTRYIATASKTMLQKYGVPVDVNTGMATNELRHQFGLNNILPHEPDTDAYIPTGDKVDTATGEILQFSADKAKKSRQDHRHHAIDAFVVAMTDRAMLKAMVDAHQIEQDNKNPSRQKTREDRIRERRLVLPESWEESEELHSVLKGKLVTTVASHMVKRKVWGALHEETLYGKSSYDQSLDIEGMTTAILKRVQRVAEADTSNTDWIADEELRSMLADWSKEMLEKKPSDRVLPYWKGKELKKFDYQCPTVTVRRKLMDELGLLSGLKEEWKPGAKTWVADKSIHDALFKWLEEHGLTGKKGKEIKEVLTKVPPRVLNKKGEPSTPILNVRIARAMTDSYIKIANSYVQPGSNHHLVIYHNGLEGKNRERRVEMVTMLEAAKRAKSNKPVIDRNPPLEWDGEWHYELDLCVNDMVRCEDLDIFENDNFAPEHRASPWFRVQTMNSGGRNKVDLRLRHHSVSGTDSNWGLWRIRSLKNVRCRKEQIGNLGLLVDDS

SEQ ID NO: 29 - protein, 1669 aa, synthetic construct
MPEKPIISPISIDLGAKNTGVYFAHYQEGSSIENIEKEGKVYLLEKDKYTLLMENRTAARHQRRGYDRCQMVKRLFKLIWEKHFHLEWNKDVQQATSFLLNRRGFTFLTEEYDTEKLSRFPKEAYKLLPDELKENVACTDVEYDFSVKLKEWTNEGETKVKEIFEALIKEPKRITKRQVLIGRTKKLREYCEIRKKREKISDEKRKVLSRLSKWIWNEWQQNGVQGLDENFVAKNKSDDSEVEWTFPGHFDLIIYLNNQSRDIACQILDSLPGTASEEKELKTCVWNFKTEKFDLEKAGLGFDQPDNSGDSASQGQQKEWLKTHLHHLAFALHKTLHELESGGRHRSKYFEEVKKVLENPNHTHDYLKNFCRKLQSGCYPDLDKVNFANLIGHISNLELKPLRKYFNDKSHRNSDYWDETRLNELFDRWILREWRVDTGKDKEKADGKRGDYKNLQECWNDYKKTNPNTVIDFWLKTNPFFTIPPYQDNNNRRPPKCQSLILNPEFLNRKYPEWQDWLGELRKLPTVGEYLGNFVCQLRSLKGGGKSTYFSDKETEPKKKNGKPKSPKELKAGNQERRPLEALDARILQFIFDRVKADDPLKLNEIYSQAKKWRQEQSTEKEKQDAKCKLEIAIGESGLPNGLKTNRDYDNKGLLQEKTFLHLVCKYYKQRQRAKDGRLFIHPEYRYVKGRGYENTGRFDDRNCLLTYCNHKPRQKKYQSFHDIAGVFQVSLEELKEIIGSTDDSEVIKWLKSFKAERSSLEGICERAAKAQKEHRGFLKENMRKAVSAHSPGADDRELRNLDQNIKALSHELAKSLFGQRIQQDDPRAQKFCSVFSFAQIHNIAFKDRSGNSNTCAVCGADNAHRMQMTENTGSKEGSAKAQRLPAIPTRLIDGAVMRMARITGGAIAEEKWKKIEKSLKQEKKVRVPIITESNRFEFEPSLKEIKGKSLKDTDKLSREKGQEQLATNKDERIKEASLGICPYTGKNLPENRGDKDHIIPRSSKRGTLNDEANLIWASDTGNKKIKKDKEFSLRDLKKAYKQKQFGAKDDQEIKQWIIEQIGDGEGENFSFGKYRSFTNLNQDQQKAFRHALFLKGEPLREKIINAINNRTRMLVNGTQRYFAEAIANSLNKKARTIGKQSLLSFDFFGVEAQSNTRGDGIKDLRNEYEKTGLIGQEYAKKEGQKQKPYSHLIDAQLAFAITACAHKNAGGLRLTICDSLNLWPLDKDTGEIFEKTIFGSIQVKPDEMQPLEELQRRKVYTVETHHRKIITENRKPSINYQIHRDSICKESFFPILKFKDDKYKKGFDQSNCADFKADQFSLLLENSFVRQTSSNAHYEVWNILKKDCQQFLMKIGSVGANSQERKIAKILDNLTYQTIKKPLEKVLDTSRLKNKPPQTVGDALACWPECIKEKDFHKDSVILPAYYEWMKLHRHLQEADKEKTFYEFVKNCSLFKNTQSTSDHNKVRKVFSLPVQISIGNIRLQRKSWDKTQVIQIVAEESLAKYGYDGKGRPHTIISKNSVPKKHYTGIPDNWNLEPLEWKRVPVEKITLRTPDIEVKDAKIKNKDAGRCMARLKVSSIKDLSLPQDKRDWKGKVICHESEEEMKKAQDRDKKDNHHCLSSQFKWFDTPFTLQNDRREVEIETSPDGKVITFTISKSSKVKSWLSA

SEQ ID NO: 30 - protein, 1360 aa, synthetic construct
MNIRKVDNYAVGLDIGTNSVGWAVVDDKGELLKFKGKNTWGSRLFDSADTAARTRAYRTQRRRYDRRKYRISLLRKLMETDVFALDENFYHRMEQSYLWHDDRDFNEKWVLFNDANFDEKKYYETFRTIYHLRDALVNTHEKMDIRLIYLALHHMIKYRGNFLREGDLTAADSNITAALGEFQIQLMDYCERYGIVCGTVDLVAMAFAIQSGSEKRAFRAEKVQSALGFTGEWKNIGKQLSRAMFGYEVNYASFFEVEGTEAKFALDAEEKVEKFVDEVLPEDDAPFFESLRSIFNAYLLAGILKDIPEGKTISYGMVGKYEQHKNDLDTLKTLVKKYVPGRYDEVFRGAKYADGAYKRENAEGYTAYILSEKKLSKENFYKYLKSIFADSEMLPEDADIWVTVEAAMEEGNYLSKLRTRENGAIPHQLHLEEMRKIIENQGEYWPTLRENQEKIEAILTHRIPYYVGPLGKNGVPNRKEPFTWAIRVEGQEDTKVTPWNFDKVIDKDASAELFIRRMTGKCSYLLGKDVIPRNSLLYSEFCVRQELNVCTIARDGERPVRFDCADIDRIFNEVFKKQKRVKVDMLRDWIRTNLGYMNNVIQGTQKEGEFASSLTSYCDFTRILGHEPESISDREMVEQLITWITIFEDKKILKRKIEQKYGTLGQDIFDKEQIKQICKLRYTGWSKLSRDLLEGLKADYNGHRVSIIGILRDPEGARPQNLMEILADERFGFSALVEAENQEYLSNVRGAYELENIPGSPAIKRGINQSLKIVDEIVSIAGHTPKKICVEIAREEQGKGKGSRTKTRYQMLQNAYDSLSDELKDADISDLSIKLKERSSELDKEKVFLYFLQMGKCMYCGKSFDISSLNDYHVDHIVPQSFIKDDSLDNKVLVCRHCNEEKLDTYPIPESIRRRNLRLWQAMQKADLISKRKLDNLLREDLNNRQIEKFINRQLVETRQITKHVIELLKTRYPDATVEAVKAELTHDLRVEYDFPKSRVINDYHHAHDAYLACCISRYVSIRYPSWEKELDYSAFKKFSGSEKGQRKGCKGFIVGTFSMNGFDKETGEIFRDIWDADEELLKMHRCLTYKDCFISRKTEELTGEFWNATVYSRRVETDKAIPLKKNSDPKKYGYYQSPNSAYYCLVTYTETVRSKAKTVARLVGVPVNVARHVSASGDLRTWLDTQYADVVIIKPKIMKYQKISWAGCEYYLTSNSEMINARQLWLPESYVVGLVECEHAIKKGQIDLAVYDETFIKIYERVIDTTAAAYPRYSGLLQKIEHVSDSFYSASIEDKLSRINELLGLLHANAGCGLVTNGLTPAAGRMMNINYGPAMLEGEIEFIDTSITGMYERRYSLGV

SEQ ID NO: 31 - protein, 1151 aa, synthetic construct
MLNKVGEIQKRSKKPCPISHPEFELFRAYQFINNIKYGKHPKLTDDEREKVLALINKKDSNFDFANIPKELKLTYEKFNFEDKAKVPANPTIKKLRPLFDLKVWEKSYEEIWHCFYFYEDNDMLFKKLKKDFAYKKDVETIAKIKLKEGYSNISLKAIRNIMPFLKKGYQFDRAVILGGIKNAFGKRWDYFTEYHDKIEREIISILNEDNKDGEAIDKIRDHLSSPVFAYGFKKDDPYFTYLYHHSQNVEVSDELDDYLPQVENLRNPIVQQGVNETRRLVNSLLRKYKREYGQDFRFERIHVEMGRDLRNSKKQRQQVSISIANNEKKNNEARERLAEYGLKSSRENVQKFLMYKEIEERNGKAQCPYTGKTIGITDLLGESNAIQIEHIIPLSISLDDSFANKTLCEAHFNNEKSEKTPYEFYCINPDVKLWGASSWEEVETRAFRLLPYAKAKRFTSKRKFEESNFIERQLNDSRYIAKKTVELLSCICKDVRVMPGQLTAELRHLWGLNNVLSPIHELGKHEINIDETKSTPYFVVTDKNGNTVSVHKKYNDVPVTKESEILLPGYNEKSKFTTKYFDINIEVPELSDGKYWAKLQVNSPIKVIPKYIDKPLAGEDQIILKGRVEKGTFKNDTVGSITNNQEDGNYWVVFDIVKKSFVAPEKKKTPKAKKNQILLYGNVYNGEFKCYIYRCNTNLPDGKFWMLIDYKPENIEFIKAVNSKPELNHNEICINATADDNGLLVADVDPEYKIKDSFASGKYYMTLKIEKIHPELYPIENVLPKVEKDQSIIEGNIWVDKYTGDIKFDPKKNRDDHRHHAIDAITIALTEQGFLQRLSTHNAQRKSKQREKLDSTEKFPEPWIGFFNDVKEKAKGILISHKKDNKTLTKNRKGYSVRGQLHKENVFGKRKAPQDKVESYHRRTKITELQNDKHVGKVVDITIKNLIEKYLSDKCGVNIENTKGYKIPKDAFFKYGEWQLFLPNKKGDPVPIKKVRIRESISNALPLKSNLNQYVNPRNNHHVLIYSDSEGNLCEDVVQFWTVVERRLQGQPIYQLPDGGKEIMATLEINDMFLLGLSTDEFELVKSDNSFLSKYLYRVQKVSSSYYTFRYHLASTLINSKEEFSIRSFKAWQDTNPIKVKINELGEIDRF

SEQ ID NO: 32 - protein, 1086 aa, synthetic construct
MTWRLGIDLGTNSLGWWAFSVEKEGPRWRVSDSLDGGVYIFPDGREPAKKGRVGDSNAVERRLARSLRRNRDRRKTRLRAFMRDLVALGLMPVSRQERDELFQARKGEDSDRSNPYRLRAEAVDRPLGPYKLGRALFHLGLRRGFKSNRLEQADKDGGKLKERMDELRNTLNGKTLGQFQWARFQVERERQQSGEKPSGIRFRGEGEFYPDRAMYAMEFDAIRKKQEPHHSLKPDDWDRLRNRYVLFQWPLKPVERGRCQFFLEEARHWRDTPIGHDFRIYQELNMLRWVDADHQEHPLSAGQRSAVLQLLLTRKSEVKFDSLRKQKCQDRTLLFPDCTRFNLESKKRKGLKHHAIGATLTENPKLSPLWQRRCSDKGDDGLLDDIFEALHEEDDTDSLGSRLAEMGLDAEAVQELIEWPRLSRATANVSRRFMEAIVPIMRDQKLLYWEAVSEVKDRNGAPLRHSQQPEGGHYDTLPYYGEVLHGSTLGANPAADPQTAPEQHFGKINNPTVHVALNSLRRVVNTLTERYGERPVEIHVELSRALKRTRTERDEDAKQQADNQKENCRIREELTKHGSAQPSARDIKKYKLWEELGKDTLARCCPFSGQVISCAQLLNGEAEIEHILPFKRTLDDSMANLTVAMRWANRLKGNKTPYEAFASNAYAAKGIEWEGVRTRADRLPDNKKWRFGPDAMARFEGKPGSGFIARQLTDNAYIARAAKRYLNCLKGVKQIVPNRGGLTALLRRKWDFNSILSDTAYKSREDHRHHAVDAAVIGLADRAMLNSVSKQTARGADDRVHIMVPELPEPIEHAIRARVPEIVVAFKPDHGWQGAMFKDSAYGFIPLEQRDPDMLEHNLVVRKSLAELTLKECGFVQDKKDKRIRYVVGCICDEQIRSSVGAYLTQAAENGEDLKKDAILKKVLARFGAEHGIGRVRILVTDQTVKPIASAPYKGYKPDSYVCCDVWRCPKGKAGKWQHERYEWRGVYWAYAETPNGVPAPQTRKPHPAAKLVARLYKNDMVAYEEGEQIRVMRVAGFSTTNNKLDVVSHSAADPKQSFVAINALGVAGLRKLWVSPDGRVKGSTR

SEQ ID NO: 33 - protein, 1405 aa, synthetic construct
MKKILGLDLGTNSIGWALVNESENKNEFSSLIKTGVRIIPLSTDESNDFEKGKAISINADRTMKRSTRRNLQRYKLRRKQLLNVLKGNKLIDNKSVLTEIGPNSTHSLLSLRAKAANEEISLENFARVLLAINKKRGYKSNRKAKDDTDGQAIDGMHIAIQLYEQNLTPGQFVYERLKQDKKNIPDFYHSDLQNEFDAIWEKQNESYPDILTIELKESLKNKNKGQSWKICEKPFNIVGIKQSGNTQQKKLELYKWRAQALKEKIDLEHLAIVIQEINSQINNSSGYLGEISDRSKQLYFNRITVGEYLYEQIRNNPHTPLKNQVFYRQDYLDEFERIWETQSKNRKDILTNELKEQIRDIIIFYQRRLKSQKGLISICEFEGLDIEIEIDGKKKKKTIGPRVIPKSSPLFQEFKIWQILNNLKFENIETHTIYPIPELDQDLSIRKQIFDVLNTKGKLSPREVLNTVLENPEKWKVKNFKELEGNSTNQKLFNIYSKIVELSGHRINNKNLKESYADIFKTIGINPDVLEFDAELKSNLFEKQASYQLWHLIYSYEGDNSETGNDKLYKLLYNKFGFEKDYAKLLINISFQNDYGNLSTKAIKKILPYLKAGHEYSEACLLAGYNHSHSITKEDNEKRPLDDFLELLPKNSLRNPVVEKILNQMINVINAIIEQYGKPDEIRIELARELKKSAEERAEMTRQITKATTEHNKIREKLKEIYPFNTGIRITQNDIIKYKLWEELAFNGYKTIYTNSYVPIEKLFTKEFDIEHIIPKTVLFDDSFSNKTIAVRDFNRIKSNKTGIDAVAEKYGKDSTEFKRYINTVEKLYENNKISKAKYKKLLMTADEIPDGFIERDLRNSQYIAKKAQEILRKIVKTVTPTTGNITSKLREDWQLINVLQELNWEKYAKLDLTDFEINKEGKKIPVIKDWSKRNDHRHHAMDAITVAFTKPSLIQYFNYLSARKNEKHKKHSNIYAIEQKETFVNDKNKRLIKPPIPIEEFRAEAKKQLESILVSFKAKNKVVTRNINKTKKKSGENKKIELTPRGQLHDETIYGKSCRYTTIEEKVGSKFTKDYINNVAIKSQKEALLKRLNEFDGDAKLAFTGKNSPSKNPIYLDEHQSVKLPEKVKFVVLEERYTIRKEISPNLKIDKVIDKKIREILNKQLKQFDNDPQKAFSNLEENPIWLIKPTEKNKWENPDKPKSHELGIPIKRVTITGISNAEALHNKKDHLGNKIADNNGKVIPTDFISPGNNHHIAIYKDEDGKLYEDVVSFYDAVTRVNQGSPVVWHTHPEHPDWQLMFTLKKNEYFIFPDPEKGFNPSEIDLMNEENYHFISPHLFRVQKISSKNYVFNHHLETQAVNNDTLKNKNLAKTTYNFIQTPEKLKELIKVRINHLGQIVKIGEY

SEQ ID NO: 34 - protein, 1065 aa, synthetic construct
MITTNGMKYRLGLDMGTNSIGWVAVKLDEDGRPCGVLGMGVRIFPDGRKDSASGDGPSNAEQRRMARGQRRRRDRYLNRRADLMQALIDCGLMPTYEAERKSLEKLDPYELRACALDMKLPAHHVGRALFHLNQGRGFKSNRKTEKREKDTGPVKEATKRLSDQLSASSARTLGELLYRRRSMDEPVRFRNRNQGTNLKAEYELYPTREMILDEFDKIWKTQKKHHPGVMSNDAKKRLMGIIFRQQDTAPPPVGKCTLDPASDDGDAEGFRCAWSHPLAQRFRIWQEVRNLEVQETGLRWRRLSKEEGDKVAQALLEQNTVSFNKIRRILELPSGIYFNLESEKRQKLMGDETAAKLSHKDLFGEAWRKLPLDRQIEIVDLLVGDKSDDAAKEWLTRHTDLSSEAAGRVVSAFLPDRHCRLGLRAIRRLLPHMEGGLDYPSAARATGYDHARAPTGELSPDGRLPYYGEWLKDHLAGSGDPKDPPDKRWGRYPNPTVHIGLGQLRRVVNALIGEYGTPHQIVVEVVRDLKRSKKQRENIRKEQAANQKKNEARDREIRDLALRPSYENRLRLRLWEELNPKNACDRRCPYSGQPISIDQLFSAEIEIDHLIPWQDSLDDSPANKVVCFRGANREKGKSTPHEKFGKTPEWKGIAQRASKLPPNKRWRFGADARERFDGQGGFLARQLNETAWLARLSKEYLSAVVRPYNIWVTPGRLTSMVRYKWGLNELLPGYDREAKKRTDHRHHAIDALVVAMTDRSLLQRMSSAYDETRSRIIVPSPWEGFREGVQPFLERMVVSYKPDRGTPGKRGSTSGQLHKETAYGLIEFSEDGPSKVVVRKKISEFKKRSDIDTVRDATLRAALLELWDKVHWEGGKADDFAKMAGTPSALGGGLQPVRGVRVVENMNVVAIRDKDGRPYKGYKPDSNTFADIWEMGDKSKSWKIVVVSTFDANQPDFNIEKFRPTTARGKHRGKPDPAAKRLMRLHKDDMCALGSGSDRRIVRVRKFDSGTIVFDSHNESNVDARERKGEMDRNKSIYSAKRLREEGFRKIGVDEIGRVRDPGPT

SEQ ID NO: 35 - protein, 1083 aa, synthetic construct
MAANDMRYRLGLDMGTNSIGWAAVRLDDDGEPCGIVDMGVRIFPDGRNPTDKTSNAVDRRMARGQRRRRDRYLKRREDLIGALVEYGLMPEDADQRKRIANDNERFDPYELRAKALDGQLTPFELGRAIFHLDQRRGFKSNRKSESGDNEDEAQKTRSDISRLRESMEESGARTLGEYLAKRRGKGKSVRARPGEGLYPDRAMYEEEFKRIRAAQEVHQSLSAEQWDKLREVIFFQRPLKPVDPGWCLFEEEEQRAAKALPLFQEFRMLQEVNNLKIQDGVEDRFLNVGERGRALRRLRLGSNINLNVDKPLASLGLPSGAKFNLAAGGRKRVTGDETTAKLAALPKKATTKRPATPGMFGKRWLEFSLEERNEIARFLLDTEDPEVARERAVREWGLSDAQAVALSNVSLVSGYGNLSEKAIRKILPHLEKGLGYSDAVIAAGYPHHSDFRNEEAHERLPYYGEILTRDAVGADPEKDPEIYGEPARYGRIANPTVHIGLGQLRRVVNGLIQVYGKPEEIVVELARDLKMNRADKLNYQRSQKEGGERNERFVEMLKSMEEPVTHHVLRKLRLWEEQGPPQNRICPYTGKQLSCEMIVTARTEIDHILPFSRTLDNSVSNLVVCMAEANRVKGNNTPYEAFGQKNPPGYDYDYILANVADFPYKKRRRFEKDAMDWFEGERDFLDRQLNETQYLSRTARTYLAHLYNEKAEGSYRVFAIPGKMTALLRRGWGLNGMLSESGEEQTERKQRDDHRHHAIDAFIVANTTQRLLQKFAREAGSSWQDAAERLAELTPKPWDGFGRNELRPFLDKMVVSHRLDRGTRGVMGKTTGQLHNDTAYGIIKTSEDGSSEVVRRKPLSDFKSKKHIEAVRDPALRDALNQLWDDLGGKATEFAEHAERKGVVVNGRVQKVRRVRVVEKQRVIPIRDSEGKAYKGYLPGGNEFADIWQMRDGSWRVVVVPTFDANQPGFDIEKFRPLTTKGKYKGKPDPSAKRLMRIQIDDMGALGEGSEQRIVRVRKMSNSKSGALVWLDDHNEANVAARVGKREIRDMKYSARQLHQHGFRKVRVNEIGKVIRDPGPYSS

SEQ ID NO: 36 - protein, 1091 aa, synthetic construct
MVKYVLGLDLGPTSIGWAAIAIDENGNFLGFLKISDSKDGLHWIPAINSRIFPMPYVEKTYCAGNKETTRNKNRRDARGAKRRYQRRSQRLNETYCFLHERNILPERNEYEKLLSLDPFEIRAKALEERIDLHHVGRAIMHIAKRRGFKSNSKLGGLIDVDTDNKRKKKDKSKITLLNTYEGKTIGQICYEKHKDDICTAVRNKGEMNIWQRKDYIDEVCRIWKCQQQYYPTILTDDVLEDLVSEDGSKWLLFSQHSYKLSARKQRKYIGKCSLWKEKLRCDKSKRVAQEFVLLQTINYLEIYDSYGSKIECGVSKEDKQKILEYISSFEKGKKYSQIKKHLGYPEDWRFNFEDVEEDNSLPGIAVDDLIRVIFGERKGNKYVQIVDYSDREAVWEIVLLYIDEEISYNELRKQMVKFDVEVPDEDILNAKLSKAKVPDGHVKYCEEIVKILNAEMLKGINLHEAKQRVCKRLGLKNNSRVLSKLPIPDRAHGFETTNPNVKVVLHEVRKIVNQLIKEFGKPERIMIECGRSIKANKKQREVIKKKQKDNNTLKKSVREIFDVNDQIPAFIKCNKPGWAIKRYILWQQQKGMCPYLDSSKKQIPLSKLFSSEVEIDHIIPREISFDNSLNNQVVCYTNENRNKGLNTPISWLKETNPEKWVNTQNAIKHWKELTKREKITIDGEEITLEPNRNKWERFFVNNKDVHNKYSPKNLLNDNSYIANEVKKYLLRLYPSENQQGRQNVDTTKGMITSELRKIWGVNSILRKDDIDQKNRGDHRHHAIDAAICAVTTHSEIQKITRELQQAFPETDYGKIKISKPWSGFERDLKEVIDSINVSHRPRRQVRGSLHGDSFWAKDSNGKFVQRKKVKDANVSTVCDEKVRDLIKKWKESNQSEYPMLPNNNHNVNNGEPIPVKKVKCYSGKNENQFIEIRPGKYVEKPENHHVELFELEENGSTQIIAKIWNTYEVSKRIANANRKYNKLAKSGEKLNMTNCIVIREHPEYSEATFKFSFSKGDIIQMDSKKGGRAYYRAVSIGENDYWFWELHIASNEKPKADDLDGHRLRSPNKFLELNAKKVTVAPLGRVRWAND

SEQ ID NO: 37 - protein, 1615 aa, synthetic construct
MSKRQSVISPISIDLGAKNTGVYFAHYSAGSSVHDIEKWGRVYRLEKDDYTLLMTKRTMARHQRRGYKRRKMVKRLFRLIWCQEFGLKWDDSVQQTVSFLLNRRGFSYLTDEFHTEFLDEFPKEAFCELPENIRNELHHYSKINESLFEWKQLGANHVIDLLSELSEKPQKIKRRLVVISRAKELKTHCESRIEGNEIEGNKKRNSKLRKLSKWVVESWVSEGIRCADAIDEKANVVDMILYLDQIELEKVKTMLESIPIDEHESEAKELRASLWNFDIGKFDLEKADFEKNFVRSHIHHFAFALNKIKDELTSGARHRSKYFEEIHDVLSRNNHTHRYLAEFCTKLQNCEYTSQNRTPITVASLSKLIGHLSNLELKPLRKYFNDVQHKHEDCWDGERLSELFGRWILKEWRVDLTKDRDKAEGKRGDYRNLRDKWKSHGSGVVDFWLQEDPHLTIPPYQDNNNRRPPRCQSLVLNPVFLDEKYERWQYWVSELTSLIEVNEYLKDYQTDLGSLKSGKGRFYFSDDQLAGNRKIDAGRRTRKDLDARVLQFILDRVKASDPLKLNEIFSHVKKIRQLQSTPEEKKIATRKLEDSIKCSKLPDELKTKRHYKNEGVFSRGSFLHLVCNYYKNRQKARDGRLFIHPEYHYVENCGFTRTGRFESSTHLLTYCNHIPRHSHNQLVENLAALFALSPQQLMQRTNSSTNKDLLDWLERIKGLKSNCEKAAKEQKVRRGRLKEDILATQEDSKSELGKLKDKSINLSIQLYDQLNCKVGDSTSKDPVASVFLLAQINNIAFSDSGGKSKTCAVCSLDNARRMQFASDSVHAQRLPAIPTRLIDGAVMRMARITTHAIAKDKWETIEDNLKKGMTVRVPIITESNRFEFEPSLNALKGRKSDPNTSRVYSKQDRIKSAAGNISPYSGETVGDEGDLDHIIPRSHPEWGTLNDEANLIYTSKQDNRDVKGNRIYTLSDLHENYKLTVFNLSESTEIANWIETTIWDAEKEDFKFGQYFSFSGLNIDQQKAFRHALFLENGNPIREAVLGAINHRAKTLVNGTQRYFAEVLANELHKKAKAINKHHLLSFDYFGVEAQDNSRGDGIHNLREDLVKFYRQDLDVFSKKDDEPQEAYSHLLDAQVAFCMIVDAHRDDGGLRIDLEDIGIWSRVDRNTGEIQTGKNRKIYGSELFDAIEVKPNQMRRINLKRYPLEQNRFSHRMIHRDTLYAEHYLPILVDRETSKIRIGFDWKNSFELNESITNRQNLYFALKFNPKTKDMNLTKDESFEDLVNRLEQIGNWKKSGTNFLCLPLRKQMIHNYYIENFNTANGISGKDQGSGFKFLRNKLAYRTERKRITTLKEAKIILDRESNFQLPKSQSGLVLPVKEEWKKLVAAWKRKPESTEDSEFLSRYFIKNPDNKPSHEKFRTEFSLPIKTPHGKILVKRNSWDDSFIFQILNDSDPSGAKAFLPVFKNGKLAKLLSNSANSSNVFLFTQENYYSEATGEIRSFDPDKWYAVNLSENEKVQGIESLEYQIPDNTRPVIRVKFSESRNGDDVGEILKSSSLHPLLAPRLPSFKDKDKENLAIQQLLEELKEKLSQGKPLEYKGASFSREIKRKLSEIL

SEQ ID NO: 38 - protein, 1020 aa, synthetic construct
MAYVLALDIGIASVGLSGVDYPNEDILFCNSHVFDAAENPKNGASLALPRREKRGQRRVIRRRAGRKKAVRRLLSQHGLRDIDVIDASKSSNVLCVWELRKEALERLLNDAEFVRVLFHIAKHRGFQSNRKDQSERNDIEGMKVLTGAKELEEAMIRSGRETVGAYISTLDKKRNGDGDYSRMVTRDLLHSEVKYIFDAQRKYKNDKATQELEHEYAAIAFTQKPLRSSAWMVGDCTLEPAEKRAPKHSYTAELFVLWSKLNNLKIRTTGKGERFLTPDEKNKITALVHAHKTGVTYTRLRNTLSLEEAERFNIGYRKTKKEQDSWEKIRKATEAGKFFVLDGYQTLKEVLADSDIDWQNRLQNKREQLDEAARILSFYEDEKEIRDLLSQAGFSEKEQDRLLKITGFSKTVDLSLKAIRKILPHMMQGLTYDKACDKAGYDPHGAAGGQKGDKLPPFEDIRNPVVNRALAQSRKIINACIRTYGMPETIILEFGRDIGKSKQDRDKIERTIKQNEAHREEAKKHFIELTGQAEARGGDILKYRLWQEQDHTCPYCGVCISGDEFKDPLATQIDHILPYSRTFDDSYMNKVLCHMQCNQDKGNRTPFEWLGQKAIWDKVEALSAHLPKPKADRFVMEVLDEEGFKERNLNDTRYIARLLKSLLEKHLDMGEGNRIQTRNGRLTAHLRRMWGLQKSRDTDRHHALDAIVLACSTQSHVQRLSNWNRYEAKKGKAEPYAPKPWDTFREDALEAVSQIFVSRLPVRKVTGAAHEDTIRSQRANGEIVQRVKLAGLKPDMLERLVDKERNTALYTVLKERLDAHGGKPEKAFVEPVYMPCKDPGKQGPKINAVRIVTKEKSGIPINEGIASNGGMVRTDVFEKGGKYYLCPVYVHQIRKGKGALPNKVITGKEEKDWTVIDDSYRFLFSMHKNDLIRVVKKDGTNAFGYYRTTDRSGGTIKICAHDNDSSFGNKGLMKIGVQNLKSFEKYTVDYFGNKSRVRKEERNGMAYAADSESGQTLAVE

SEQ ID NO: 39 - protein, 1088 aa, synthetic construct
MKYRLGLDLGSTSIGWTVLKLDGKGEIFSLEDMGSRIFSDGRDAQSKKPLNVARREHRGARRNNYRKFKRKSELLEVLIKHNMMTTNREEQKIVANKNPYKLRKRGLDERLSLYDFGRALFHLGQKRGFKSNRKYDNQEAEKSNMKVAMADFKNKLAKSNCRTIGEYFCDKIENGERVKITVSNVGSKNSYSYVLNREQVEDEFQKLWVAQAKFHSELTEEIKNEIYHAIFWQRDLKPQEKGKCQFEQGEPRIAKAHPLFQLFRIWQEVNNLKIITFEGKKQDLTLEEKVKLVQKLSSQKSCKFSALRNEIFGRALANNYEFNFEKSESRDGLEGNLTFSIFRSEKCFGAEWDKFDLPTQNLIVEKILNEENIKEVEKNLVSWLSKTYDVSQEKAEYISSVSLPSGYANVSKKAIEKLLPYLEKGLQLHEAIEEVEYTINNYDGTLYDEGNLPYYGEVMPHHALFGNGDQNQIPEICYGKIGNPTVHIVLNQLRTIVNLLCKKYGAPKQIVIELARELKLSKKKNDEINETNEKNRKSNEKAVAFLAEHGLPKNKENIIKYKLWVELNAKDDKNRCCPYTGKNIGFTTLFSNKVEIEHILPKSRTFDDSYANKTLCFRQANLDKGNRSPYEAFGQNSIPEYNWKNIIDRVKENLPKNKQWRFYPDAMEKYEGENPIIARMLNDTKYVSKIAREYMQYVCGANNVWTIQGQLTAKLRHHWGLNSLIADDNNKNRADHRHHAIDAFVIACTTRGMLQKIFTQVRESRDRLIEKMPPPFENFNLSEMQSLVDNILVSHKQDRHGATKHIRKNLHAWNKKTFGELHKATAYGLYGATILLKNLKKEDLPYLIHNEHYPQLRDYLEGKIKSKDVPKIDIILRFNKTFDLYKSSLIDRIKKISLSIRRPITEIRSNEIVCNNYIREILSKKSNNSENLTKLGIIRVKVFDDSIDPKTVIPIYDKNGIPYKYFVSGNNYCLDIYMPNRGTNAGKWQMEVISNFQAHQKDFKPNWKIAEPEAKLIMRLFINDIVKYEDEEEKEIIGRVKKMDQHRAYIKNIRISDDTDGVSFSISKFIKTKARKVYISPIGELYEP

SEQ ID NO: 40 - protein, 1043 aa, synthetic construct
MPLVFGLDIGTTSVGFAVIDYDSELATGKVHRLGVRIFPEARDPKGVPLNQERRQARLRRRQLRRRRERRRLLSEHLCAAGLLPTRNSSEWECAMKRDPYDLRRRAFEGETLSPHEIGRAIYHLMQRRHFKGRDIDEVSDTADSAGDDADDKQATSARELTGQALKREGKTLGAWLAARGPHERKRGEHATRSLVEDEFDKVWKPLIPEPFRSLVRDVIFVQRPVFWRLKTLGRCRFVPEARVCPKGSWVSQQRRMLEKLNNLALAGGNQRPLDPDERQAILSRLQTQASMTWAGVRRALAPLYRARGEPGEERALKFNLQEGGEKTLLGNPVEAKIADIFGNEWQNHPRKQEIRDVLPHQIWQADYEEVGGQRVIILPKTERVSRRAAVVRNFVSEFSLSDAQASKIETMKLPSGWEPYSVEALQAMLPYLEEGVRFGELINGPDWEDWRAETFPGREQPTGEVFDRLPSPAQREESEHVAGLRNPTVARTRNELRKVVNNLLDLYGKPDLIRVEVARDVGNSKRQREEKATGIRRQELRRKAAREKLQQYGISEPSRADVEKWMLWEECGHQCPYTGDFISFDALFKTGDFDVEHVWPRFRSLDNSFRNKTLCRKDVNLQKGNQTPYEFFRGNQEEWDAIANRLANMKASKSRPGMPPGKIRRFLARSIPEDFAARQLNDTGYAARDAVTYLKKLWPDQGPDAPLKVSAVSGRVTGHLRRLWGLNNILADSGEKTRSDHRHHAIDALTVACCHPGMTQKLSRYWQEEDDPRATQPLLPPPWKTIRSDAEKAAASIIVSHRVRKKISGQLHKATVYGDTDEEVEGGRGVTYRNFVRRKAVEVLKNSEAPRFNGTRIIDIVDDGVRDIIRSWVERHGGDPSAAFVQGYPKRSRKGPEIRKVRLRVKQQIELMTKASTGFADLGNNHHIAIFRLTDGTIDYEVVSLLEASRRKERREPVVKRVRDNGARFVMSLSPGDSLQLTRNVETRLKIVTSVWSEGRVVLVDHDDAKGTTEFRPGAKTIVSNGGKKVAVDPIGRIRPAND

SEQ ID NO: 41 - protein, 1068 aa, synthetic construct
MSYILGLDLGETSVGWAVLEERGNKPVALKDAGVRVFPKGAEVDEKRGISTSESQTRRQKRSQRRIIRRRSDRKKALKNLLLSHALLPSDNEKQESLLQADPYEIRTRGLDTKLRPNEIGRALVHINQRRGFKSNRKSGDLKEEGILATSIGTLAKAMEESQARSFGEYLYRLDSGYDKGASKENTRERQGVALRNRGGGYEHLPSRAMIEDEFHLLWSAQAAHHPGLLTKDLKRAVEGIIFYQRSYAISEDRRASWGKKFVNAKMAPQLKHCPLFPEEYRSPAGTWEAQRFRLLKEVNNLEVLDEYGKGRKLDTAERKTLVDALGIEEKQTFVQLSKLIALPKEHRFNLEAGERKHLDGNKFEVQLIKGYYGKKTKKEKEAWLALDGDFKGHLRELVANVEDADQFTETAKELGLTEKQIEGLRTVQPTGNYLAYSYKAIQNLLQFLEDGLDEYHAIQKAREQGVIPPSNEPDEYDLLPLPPDLPNPIVTRALHETRKVVNLLIKTYGKPSRIVVELAREVKHGPKRRQSISRTIEENRKRNEKVKAWYREHGVLTPTRDDVIKYKLWEDQNHLCVYTGKTIDQEDLLSDQNVVDIDHILPRSRSFDDSYRNKVLCVTQANREKGQRLPVEWLGGPGNERFDKMLVRLKNMPSIGHDKFARFNQEKIDTEHAIARQLVDTQYISREAVAYLNQLFPKELRVGEKAVGTVIGKLTSDLRHVWGLNTILSGQEDLKNREDHRHHALDAIVVACATRKHVQELAKRSKWGQDPSEVPPPWKRFRDDVKHMVDSRKRTWKLGDQEITTEGMLVSHRAEKKILGGFHQETNYGPTRDPEWFVRRVGVRSLTGPMIKGIRDDAIRRILTKHCEENGYNPEQDGRTIPPKVFQTLPTMPSGVPIRSVRIVERKQKGIEVFGGKNGIAPRAVLLGNNHHLEMVERDNNGVKEMLVCIVPTLEAARRSRIRKEPIVQRDHGEGMTFKLSLARKEAVVFHKNGKHHLCYISKMSGSSTLSKGSGSMDLTFRLDKDARPAGEGNKSPFARIVSFKAWDEHSPIKVAVDPIGRLSKAND

SEQ ID NO: 42 - protein, 1065 aa, synthetic construct
MSTCAEPSDSYVLGLDLGVSSLGWSCLNVTTEQAFSIRCVGVRIFEAGVDGSIEQGKDSSRATVRREKRQPRRQIERRSRRQRKIFRILQRQGLMPDGPSTDQVQIDRLISDLDRTLRTQLLKPGDHIAAQVWPYKLRAMAMDQHLEPHVLGRALYHLAQRRGFLTNRKTDKDDEESGKVKAGIAELSRDMGNQTLGQYLASLDPDTVRIRQRWTARQMYEDEFEKIWTAQQTHHPKLLTPRFKRKLEQAIFKQRPLKSSKALIGRCQLEPDRRKAQLASPLAQRFRLLAAVNNLLIYEPDGKQRTLTADERTKLIQALERSGDLTFAMIRSKKLLDLKKTHKRKDKKTGKQVVTPGYAFNLEEGGEKKIPGDRTAAKLVPIFGDRWFDFSLRQQEQIVHDLLEYQNPDALATRAKDKWALTDEQANTFSKVRLEQGYARFSRRALQRLIPHMEEGLHYMTAQKDEYPESFEVQETHDLLPPVLDAIKDLRNPAVCRALTELRTVVNHVIKTYGMPTMIRLEMARDLKRPRKQREQAWKRNRDRQSERQVAAAKIKAAKLVVGEPNRDAIEKWLLADECNWLCPYTGKTISAEALLGPHPQFDVEHIVPFSISLDNTFINKTLCDSHFNRHRKANKLPTACYDPDGQEWQDTLSRVRRFRGQASSIKLERFQWTEVPDGFTNRDLQDTRYASRLAGEYLALLYGGMVDADGKRCIQVSAGGVTAKLRDVWGMNGILNDGGIKTRDDHRHHAVDAVAIALTSPATVKMLSEAATKAHSAGRHRFAPANEPWPDFIDDLRDAIDSINVSHRADRRISGPLHAETNYSRPISAPGGKLVTRKRVRLDQLTVKNIESDAIVDPSVRDAVRTKWHALGRGNPKQIFVDRINHPYMQTQDGRIIPIHKVRITVNDKPRQIGSGTRKRYVISGKDSLHHTVIVSSQLKNGEKWRDEPVDRMEMHRRLSASPCVPMIQTDWGTDRFVMALCKGDCIEMNDKNHNRSLFIVRSISKADITIRLHTDARTDEQIKLAGERSKYRIRSADELRKRRAVRVVVGPLGDIHRVKIGHV

SEQ ID NO: 43 - protein, 1086 aa, synthetic construct
MAAKQSKYRLGLDMGTNSIGWAAVLLDDSGDPCGLLDMGVRIFPDGLDRTGESSNAATRRKARSSRRTRQRYVKRRDEFMALMVQHNLMPTDQAEQRKLETLNPYELRAKALCPEKLPAHHVGRALFHLNQHRGINLNRRTENGDKERGPAKGAAKKLHESMKADSFSTLGQFLYHRQCIGEPVRFRNQGTTEKPKYELYPTRQMILDEFNKIWKAQTPHHPDVMTDKAKEALYKAISFQIDPESPPVGKCTLDPAVDPEDKDGFRCAWAYPLAQHFRIWQEVRNLEVRLPGQASRRLSKEEGDRIAGRLLKQNTVSFNGMRQLLRLPTDAYFNLESPRREKLQGDETAHKLSKKEFFGESWRKFPLPKQTQIIDCLLGENDEDFVVQWLERHTGLKRNAAERVSSALLPQGHCRLGLRAMKKILPHMKEEGLDYAQAAKAAGYDPQVPTDELSPTGRLPYYGERLGNHLLGTGNPDDHPEKRFGRFPNPRVHVGLGQLRRIVNTLISEYGRPQQVVVEMTRELSLSQKQREAREKEQTANQKKNDARRKKLQECGLPPNHRNMLRLRLWEELNPEDALDRRCPFTGKPIPMSQLFSKQVQVEHLIPWQDSWDDSPTNKVVCFTSANQAKGKNTPYQAFHDHPDYDWDSILKRASKLPTNKRRRFEKDAGEMFARQGGFLARQLSETGWLARMSREYLTAIASDVWVTPGRLTGLIRYRLGLEDLLPIKWAGDAKQRNDHRNHAVDALVVALTDDSLLNRMSRAYDEERSKIRVPLPWQGFREEVEACLDKLIVSHKPDFGKRQSEGNTTGQLHKETAYGLIEFREDAPSKVIHRKPLADFSERDVQNVWSPELRKVLKLVWDDVELELKAAGAEQTDRGKLKKASDKRRLAARFAQRVATGGVIVGQKLQYPKRVRVKSNVRHLALIEHKDSRGVVHEKGYELKSNEFADVWWMRDDSWQMVVVPKFYANHPNFDIEDFRPKTAKGEHKGKPDPTAKRLMRLHINDMGALGKGPNPRIVRVRKITDATKDPFVVLDDHNEANVPNRVGKDMRENRYYAHNLKEECFRIVKVDAIGRVDYPEPFKP

SEQ ID NO: 44 - protein, 1526 aa, synthetic construct
MKNILGLDIGTNSVGFALIEENEGQYQRIIKAGSRIIPMGQDEISDFNKGNTVTAAAQRRQYRSMRRNKMRRKLRRERIHRMLHSYQMLPAHYDMSIGWDKNDAKHYGQFLEGLEPKLPWIPINKNQSKFLFFNRFENMLQDFKRVHPDFDTENKKIPLDWTIYYLRKIGLTQKLTLEELAWVILQFNQKRGYYQLSMDDATDDATKKQEIKELEVLDVEDLGINKGKREYRVVLPEGLEQIVKSNQPLNWKGEIRTFIVTWTVDAEGNKQTDKEGKIKYSIKQLDPEAADAPFALIKQYTEIQIEDSGLHVGEYIYNSLLHNPEKPIIGKLVATIDRHHYRRELEAILQAQVAFHPELQDHALFDKAVEELYPNNSSHRLSLQAHRSFVKFVVEDIVFYQRPLKSKKSTISNCPLEAREYIDKETGEFVTVPIKCIPKSHPLYQEFRLWQFVYNIRFKSVEITSKKDSDVTAQFLSTPAQYATYFDWLNTKDSIKGSQLLACPSFKLKPKERKAYECNYLEDKTYPCNKTAALYYKLLKKAGIDVEVLEEIESNWMTKLWHILYSVTDLEQREKALDSYAEKMQFSVEDTSNFVTVFKQAQAGEEGYGAYSEKAIKKLLTLMRTGYHWDLSSNDKVLSVVEEWLETGECPKYKNLSDNLREQATSQVTSRGFKEVNDFQGVPFWVASYILYGRHSEASNAKKWKNTRDLDVFLAEFKQNDMRNPVVQNIVRETLLVVRDLWKAYDHIDEIHVELGREMKNSADKRKAMTARIEENENKNLRIRRMLQEFQNASYGVEQVRAHSPMQAEALSIYEEGAIANGGEMPKEVFAIHKKLADSSKVPTASEFMRYKLWLDQRYQSPYTGQIIPLSKLFTSAYEIEHVIPKSRFYDDSFTNKVICESAVNKDKDNMLAMEYIQSRQGKEIACGSKLVPILTPEQYEHHINEVYGRRNRLKAEKLTITEIPDSFIERQLNDTRYISKYVMALLSNIVREDGEETSTSKNLIPCTGGITTRLKKDWGLNDIWNSLIAPRFQRMNELEKTNAYGEYREVDGKRFFQINIPLDIAKGFNKKRIDHRHHALDAIIVACASRRHVQFLNSQEAKSNPKNHDALKEALMVSKGKGNGKGLRTPWPTFTKDVLDCLQNIVPSFKHKARVVSRGSNYTEYIDATGRKATKKQTKGDLWTVRKPLHKETIYGRVNRLIQEELPLKKALDHIDWIVDKEFAAFLQELVDQKKKPAAIVKTVKEHEKYEQYAVAVPVNYYSDELEDETKHLVVVRKSLIDLGDSLKRNSIEDDIMDGAIRRILLNHLDKYMDGDTDHPELAFSADGVNELNKHIIELNGGVFHHPINKVRVTTVKGQRFKVSDACGGSKHAVAASDTNLFYAVYLNEKKDKREYATVPFYEALRCKQEDLPVVPEINENGAKLLFTISPNDLVYMPEEGQSLEDIKSIEDINLNNIYRFVNSSTNRSFYIPATISSMIKEKVEYLKANKIELDDEKMSIKTHCYPLQTDRLGNIIAINNIKLD

SEQ ID NO: 45 - protein, 1078 aa, synthetic construct
MTNVKDKKYRLGLDLGTNSIGWAAVSLDDNDEPCGVLGMGVRIFPDGRDAQSKTSNAVDRRMARGQRRRRDRYLERRRDLMDALVEFGLMPQDAEQRKDLQTLDPYALRAKALDEPLEPSELARALFHLNQRRGFKSNRKADTDEVEGRSLSERIGELRRQMQETSARTLGEFLYRRRVNSETVRARPDLRLYPDRAMYLEEFCKIRAAQKPHQPLTPDQWDKLKEIIFHQRPLEPVDPGWCQFEYENDEKRAAKALPVFQEFRILQEVNNIRVRVGSQPERRLDERERGAVLARLRSGKDIDFGKLTGDLRKLLAEADFNLALGGREKIKGDETTARLASSPQPAKGDKPAKPGLFGDKWLNLPIDRRNEIVKFLLNTEDPDKVREKAIQEWGLNTAQADAVARVSLVAGYGSLSEKAINKLLPHLEGGMRYDEAVKKEYKHHSDFRNEEAHDSLPYYGKVLPRDAVGANSKKAPEIDGEVARYGRFPNPTVHIGLNQLRRVVNRLIEAHGKPQDVVVELTRDLKLNPQQKRDLLKQQREGGQSNIRFTEMLQSMGQDVTPNVLRKLRLWEEQGPPQARVCPYTGRRLSCEMVVSEQTEVDHILPYSRTLDNSPSNMVVCIAAANRFKGDRSPDEAFSSNPQNYSYQEILDRVAKFPDNKKWRFQPDAMKRFEEDDRFLDRQLNETSYLSRTAKNYLAYLYDEKGEGRTRVRAAPGRMTALLRRGWCLEGMLRTSPEGEITRKQRDDHRHHAVDAFVVACTTQGLLQKFARAAGASHNSEERLAALAGETPPWEGFDRNKLKPFLGKIVVSYKPDHGTRGAKTKSTTGQLHKETAYGLVEFSENGPSKVVTRKKLDAVKKRKDLESVRDSVMRDALLKLWDDVAREGGEVGSFSDRAAKEGVLLEKGRRQTVRRVRVLDKQTVIPIKRGKGHPEVGKPYKGYLLGGNAWADMWQMPDKQKTWKMVVVPTFHANQPGFKLEQFRPHADAKKLFRIQIDDMGALGDGAERRIVRVRKITNATSGAFVVLDEHNQANVADRVGKDMKENRYSARQLKQLGFRKVGVDEIGRVLDPGPRNP

SEQ ID NO: 46 - protein, 1355 aa, synthetic construct
MSKILGLDLGTNSIGWAVVETDNNKTFSLKNKGVRIFQEGVKIEKGIEGSKAAERTGYRSARRLKFRRKLRKIEVLKALIKYDLCPHISDDELINWRYKKIYPTNKEFRNWWLTDNNDNREDRKKQTKNPYYFRSKVATDQLDLTNQEDRYILGRAFYHMAQRRGFLSNRLESTKQSEGAVTQNIKQINQQKGDLTLGQYFYQCYCNGEKIRNQYTDRLEHYEQEFSHICKLQGISDEQKSTLHKAIFYQRPLKSQKGLIGKCPFEPKKSRVAISHPAFEEYRMLCFINSIKIKLPEDDKLRFLTEKEREKVIPVFYRKSKPHFDFEDVAKQLAPAKQYKFYKAKDKNPEDYLFNFNMKTTVSGCPVSARLKSIFGDEWKELQIKHERKDHTDSIIDIYDVWHVLMTYDSEDKLFEFAKYKLSLDEDKTKEFTQFNLPQGHGSLSLKAINKILPFLQLGLIYSHAVFLANMVNVIPPILWNDPENKQLIINEIKKLIQSQNEEKQITDIVNGLIKINKDSNAVWSYEAEKAFKNDLVKNIKAYYGSSKYDSFSNDQKSRIETNAFELLKMQMQKKNGVGEFAKVKRIDDRIKSFLLDNFDGDIKPENLYHPSAIETFKPAQKNNENKYLLGSPITSSVRNPMAMRALHQLRKLINQLINDDVIDEDTIINIEMARDLMNANERKALQNWQRRREDERKKYAAEIAKHYKASGINSEPNNTDILKYQLWEEQNHICIYTGKNIALHQFLGSNPEFDIEHTIPQSLSFDNSQVNITLCDSKYNRTVKRNKIPYELNNPDILLRIHHWKKEYENIDKEIQKCIKNARGASTKEDKDRYIIRRHQLTTQRNYIREKYQSFTRKDVPSGFKNSQLVDIGLITKYARLYLKTVFERVNTVKGTTVADFRKLWGLQNAYETKARVNHIHHCIDAITISCMTKPQYDKLAKFYHDWEYSKEEGMDKKPVFEKPWPTFTEDVKTIENEILISHYTPDSFAKQTKKLLRKRGIIQKGKNGKPIVLKGDTVRGSLHKETFYGAIERTQANKKGELEKVIKYVVRKQVSDLSDADVKNIVDDRIREIVGNARNEEKKIQKEIERLRKKLQKAEEHEEPAIKNDICVLQTEIEQLYSLPNKKGAPIPIKKVRLLQPTVTNPLCIKKQRDVNNKKPKEYKQNYYAANDGNYLMAIYEGKDAKGKIKRDFEIVNNITAGEFFKQSVQGDLKPQGISTNGGLIPKQKENGKLVLPYKSSIKIGTMIILWEKSPTEVFDLELNEIKRRLYKVVGLSAQKLKISGKSYNYATIVLRHHQEASSSSDLKTYDGAFKRDETYMGQRKLNHNQFNALVENIDFDMNTKGTIKWIKQ

SEQ ID NO: 47 - protein, 1041 aa, synthetic construct
MSRKKNETYVLGLDLGTESIGWALVKNKKGKPESILKSGAHTFDAGVEGNIESGGDESRAKARRDARLPRRQHWRRAWRRRKILRILQRNGMMPEFDTSSPTNVHEGLLAVDSKLREKHSINSHRVSAHLLPYILRKKALEEKLPLHDVGRALYHLAQRRGFLSNRKAGKADDDEGVVKEGISELRQKMEASHSPTLGAYFATLDPEEERIRKRWTSRQMYQDEFYAIWAKQQKHHKALTDELKKELYNALFFQRPLKSQKHLVGKCELIPGAKHAPIALRITQRFRLLQAVNNLWVYLPDNTERTLTRDERNTLIEALETQGDLSFAAIRKMLKLKKGTTFNLEEGGEKRIPGNRTNTALFKIFGDRWLKLTENEKDAVVQDLMSFEKAEPLARRSRNTWKLDKQAALELSELSLEEGYARHSRRALEILTPRLEEGLPYATAKKDEFPESFESTDPLDTLPPVIETVPDLRNPAVCRALTELRKVINAIIRRYGKPEIIRIELARNLKQAKKKRAEISKKNRQNEKSREKAKAKILKELKDSLPSRTDIQKVLLAEECNWICPYTGRSIDMKSLLGKNPQFDIEHILPMSKSLDNSYANRTLCYHEENRDRKGNRTPYEAYHANPENWEQILGRVKKFSGDMAREKLRRFQMEEMPEGFAARALNDTRYISRLAGDYLALLYGGRSDADGKQRIQVSTGGITHHLRNEWAMNSILNDGGEKSRDDHRHHAVDAIAIALASPATVKQLSEAAVKAQQNGRRLFAPVPEPWKDFLAEARDSINRINVSKRASRKIAGILHAETLYSKPMPSRNGEGVRHIRKELHKLSVTEIKGNAIVDPTIRRLVQDKFTQLGENKPDKVFSDPDNHPIIVSSDGRTIPIHKVRIKAKVKPWKIGKGPKERYVSAKAGSNHHTIIVASLDKSNNEIKWEDHPASRFDVHIRKNNKEEIIKRTWNKGQRFRFSITPNDYIIMKDSNGEEQLYRVASISKGDIEFRLHNDARTMDKVKAAKQRVRAGAEKMRKHNARKVHVTYLGEVIPAND

SEQ ID NO: 48 - protein, 1047 aa, synthetic construct
MMNHSAETTLGIDLGSNSVGWALTSPDGIVAMGSRIFAEGVSAGIEQGREESRGVERREARQLRRQTDRRVRRLSKAYNLLAGAGLLPPAAKSRHLALQNLDVELGKRHASQEPGAAHTLMYRLRARGLDQKLEADELGRALYSLAQRRGFKSNRKTLAKEDEEEGQVKEGIAQLRKEIEESGARTLGEYYSKLDPVKAKQRIRARWTHRDMFEGEFDQLCAAQQMHHSEVLTDAFVARLREALFYQRPLKPIMPGKCDLETSEYRAPIAHPLNQRIRLVQVVNNLEIVPPTGLGVPEPLTDDQRDLLIETLERDGDLTMAAARKLIGIKGRGWKFNLEEGGEKRLVGNRTSSKIAEAIGDAWTLLPLGDQAKLVEDLLSDKESEELEEHLKGRFTAAQAARLVGVRIEQGYASLSLKAIHKLIPFIEAGDRYGAARHELYGDMDRTGVPLDKLPPAREKFGNLRNPAVERSLSELRKVVNAVVATYGKPDRIHLEVARDLKNPKKRREEIWKRQRANQKSREKAAAGIIAEFPNFQPRRDDLQKHLLWEECNGICPYTGRSISLNALFGDDAQFEIEHIIPRSRSLDNSFNNKTLCTVEANRDKGNRTPYEHFSHDAAAWEQILQRVRRFRGASAYQKLRRFEMKEVTTEDFLERQLNDTRYASKLSAEFVGLLYGGRNADGKQRVQVSPGLATWQLRNEWGLNSILNDGPTSDGGQVLKTRDDHRHHAVDALVIALTTNATVKQLADAAAYGDRDSRREPCSPPWPDFVDSVRKSVDGIVVSHRVDRRVRRKMHNDTFYSKPYERTVKGKTVEVRRYRKWLQNLSTKEVEGIVDPAVRDAVRKKLEEIGDPKKFAEESNLPTLPSRRGDATIIRSARIERVQSVQAIGEGDRQRFVELGSNHHLEVFAVLDKDGNETKWDGRLVSTYEAMQRLRARRHGEETPLVQRDHGPGTRFKFSLSSGEMIELDDGGGARLCVARTISQQGEKNGRRPAPMVEFVSSTDSRLKKGIKQANAWGANPVNTLRKFGCRKVVISPVGEVIEAHD

SEQ ID NO: 49 - protein, 1079 aa, synthetic construct
MNTANEKYRLGLDMGTNSIGWAAVRLDDDGDPCGLLDMGVRIFSDGRNPKDGSSNAVKRRLPRGQRRRRDRYLKRRDSLMGALLECGLMPDDKRERKKLEACDPYALRERALDEPLSPYELGRALFHLSHRRGFKSNRKAGNEDESEAKKTRAEIDALRAQIDGSGARTLGEFMAKRHSKGEPVRARRGQNLYPDRAMYEREFDAIREQQKPHQGLSAEQWEWLRSIILFQRPLRPVDPGYCQLETGERRAPKALPIAQEFRMLQEVNNLKIRVGTEPERRLDAKERERALTRLRAGKDIKLREGKDNRPAKLTRDLDLPSGAVFNLARGGRKSVEGDKTAARLMSKKEKGEKEQELFGDRWHEFSPAERNDIAKSMLKTEDPEVVQRKAMDEWGLDEAQAKAISHVSLPRGYGNLSEKAITKLLPHLEKGLVYSDAVLAAGYPHHSDFRNAEAHGKLPYYGEVLERDAVGADPTKDPEKDGEPARYGRIGNPTVHIGLGQLRRVVNGLIESYGKPEEIVVELARDLKMNREQKQNYQRQQREGGERNQRFREDLKSAELSVTPEALRKLRLWEEQGPCQARLCPYTGRPLSFEMVVSSQTEIDHILPFSRTWDDSPANKVVCVREANRYKGDRSPYEAFGKSSDGYDYDKILTYAAKLPDNKRWRFEPDAMKRFEEEGRFLDRQLNETRYLSRTARTYLAHLYDEKTEGSVRVRVVPGHMTAVLRRGWGLENMLRVDQDGVLIKSEKKQRDDHRHHAIDAFVVANTTQGLLQRFARAAGSNDDTEERLAAVAGSVVPWKGFDREDLRPFLNRMVVSHKPDHGTRGVDGKTTGQLHNATAYGLIEYSEDGPSKVVVRKKLTDFKRRADLESIRDSALRQELLALWDRVKSEGGKPADFAERAADGAVLGGHPVRSARVVENLRVIAIKDSNGNPYKGYKLDNNEFADVWAMRDGNWKIRVVSTFEANQRDFDIEDSRPVTSRGKHKGKPDPAAKWLMRLYKGDMGALEDGAGVRIVKVRKFSSGSVILDDHNEANVDGRERKGEIDRNMSIYSAKQLREQGFRKVRVTEIGRVRDLGPL

SEQ ID NO: 50 - protein, 1051 aa, synthetic construct
MRQKAPKKCVLGLDLGTNSVGWALLEEGRDGPERIVDLGVRIFEAGVEGDIESGKDESRAKARRDARLVRRQTERRSRRRRKTACLLQRHGLLPKGGLKQDSSRDAIIKSFDADVYLKYAAAVRKKKKDILQTLDQLPYFLRARALDEPLEPFELGRAFYHLSQRRGFLSNRKAPTKDGEEEGQVKQGISELAQEIEQSGARTLGEYFAGLDPHEHRIRKRWTARTMYEQEFEAIWTAQAKHHPKILTAAFKKQLYKSIFRQRPLKSQKGLVGRCELEEGARRAPWASFIAQRFRLLQKVNDLKIVGPAPFFEERGLSPEERTLLIDLLAQTGDAEFTKIRKELGLERGSTFNLERGGEKKLKGDTTTARLRGVFGGRWDALTEDQKEAVLHDVYSIQNEKALASRGVRAWKLSKADAEKLSKTAIEEGYCSLSRKAIERMLPEMEQGVPYATARLHAYPGRDRSIPVGRLPYIDDRDNVNIELRNPAVHRVLSETRKVVNAILDKHGLPGCIRIELARDLKKSRSDRAEIWKKNRQNEQLREKARAKIIKEAVIPQPSREDILRVQLAEECDWTCPYTGKHISMKALVGKDSQFDIEHIIPYSRCLDNSFTNKTLCYHEENRNRKQNKTPQEAYTPDEMDAIVARVKSFKGDRRAVAAKLGRFLTTSLDAFDTFSNRQLNDTRYASTLAAQYLGMLYGGQIDANDTRRIQAGRGQVTSDLRMAWGLNGILGDGGTKTRDDHRHHAIDAVAIALTDAKTVKALSTANSKGYAEGRRNWWKNVPQPWDGFLTELTEAVNGIVVSHRVSRKVNGPMHDETNYGKPYMDDKDKPCCHVRKPLASLSANRIDDIVDPVVRQAVRRKLEELGGDPAKAFKDEQNLPYLTTHDGRKIPIRKARIRVVASAKTIGKGSRERHVLLNANHHAEIIEITDKKGNAKWDDIIVDRYTAMRRLLKHEPIIQHEHGEGKRFVMSLTQGDVLLIKDDDDNEQLVIVRSVSKKDYCFVRLTEARLKKDIVAAGKWVRFQSFSLFQSRFIKKLHLTPLGEMRDSND

SEQ ID NO: 51 - protein, 1056 aa, synthetic construct
MGSYTVLGLDLGAQSVGWTLLEYKKDNPARIVDMGARIFEAGVEGDLESGKEESKTTDRREARLRRRQAERRSRRMENLACLLRRHGFLPKGKIRSGKERHELLAKLDKEIYDKYRKELGEDNDSLDSLRQLPYFLRARALDHKLAPCELGRALYHLAQRRGYLSNRKAQRNDSDKDSGKVEPAIHSLREKMEADGVRTLGEYLAKIDPFEEQRLRQRWTARSMYKDEFEAIWAAQKKHHRKKLHDTLKKEVYNAIFFQRPLKSQKRLIGECDLVAKKKRAPKALLLSQRFRYLQKLNDLRVTFPDGVERELTDEERNTLIPLFEGQANVSFAAMRKPLKFPKTVEFNFEKSEKNLPGNVTRARLEKIFGARWEKLDAESQNTIVGEVMGALNPDTLAKRGEFWGLDPEAAAEFGKVQLESGYVNLSREAMRELLPLMEQGMAFRTAVTERYGDQWAKTALEKLPPLIDAVPTVRNPAVTRTLTEMRKVINAVIDKHGKPTYTRIELARELKKNAKARNEIFKNNRKRRMARETIRESIQKHNGDANPSRRDIERVLLWQECNECCPYTGKKISFASLLSPESSWDIEHIIPFSRCLDDSFFNKTLCYHEENQHVKKNQTPYEAYEATAQWEDILSRVKQFKGDAAKEKLKRFQQTNLDDFEDFSARKLNDTRYASKLAAQYVSWLYGEEARKRVQVSTGQITAYLRGAWKLNQILNDGDNSKTRADHRHHAVDALVVALIDHSTVKRLADAAKKQQFKNGRYNGFTKRFGRDEPWEGFLDDVYHAVDNITVSHRVSRKISGCLHDDTIYSPPQEDEKGKEYVKVRKYLGEKFGPKEIQKVVDPEIQRILQSWLDDHHGDSKAAFADPDNHPYLYVHNEDSSRGKIPIHKVRMKEYREVQQIGKDHRSRHVWPRANNHIEIFALHDKDGNVKKWEGRVVSKLDVHQRKKQGLPIIDRHWDKQHTFLFSLTQGDTIEVDVEISNDETIRELYYVRGISNQLTCSHISDARKKGDIPGKQTENEKTRFLLRPYVTSLQKLNCKKTSISPLGEIYLAND

SEQ ID NO: 52 - protein, 1407 aa, synthetic construct
MSNILGIDLGTNSTGWAIRDTEIEDNQIVDYGVITFDKGVASEKGNEFPKVQKRTESRGKRRNYQAEKYRKWELLKFLIEKGMCPLTIDELNNWKKYRKGEQRKYPQSEEWINWLRFDFNGDGKPDFHLFGKDEHESYYIFRAAVLDSNFKFVYENNPQILGRIFYQLVQHRGFRGRDEEEAKTMLEGSTKNGTAGRNDIASYIDQHKTLGAALYHYQKENGGRIRQRYNLRKDFESELQQICAFHNFSEEDYKKLWKAIIWQRPLRTQKGLVGKCIYEKNKKRVQISHPLYEEYRTWIFINNLKIVPPNGYDKEAYLKEKIYPLFLRASNDFKLEAIRKQLTKDGAIMLAHFADKTKVISAKLLNAYSTLLGEDWRENFGWNTINNRDKQPQKKTTANYSFEDIWHVLNTFDGQENLKQFAIEKLNLDEEKAEKFSKLKLNNGYATLSLSAIKKILPFLQKGFLYSQAVYMANLYKVLGSETISDELIDYFANEVNEIIDGNKKEKLQNTIVNSLVQDELNSEHRFSIEVDRELDNSEIQQINDKIIDIIGQSSWEKNYSEEEQQELLNYVTHKFKEFLKKSVLSKRNVFIEQPRLHEQIWQFTKTTYNVPDENKKYLWHPSEQDTYVSADDYEEVMYCGKTTYIPKREIEKYLKKHDNAELACRTIKLLGSPEPISKGFKNPMALKSLHKLKHLINYLLQTGKIDEDTRIVVEIARELNNANMRKAIEQWNAKREKENDNYRKEIAQYNDEKGTKIDENDRNLLKKIRLWHEQNKRCIYTDNPISISNILNGENYDIEHTIPASISFDSELKNLTLADVDFNRNVKGKQFPSQLANYDVILKNIEVIFGKKTVKIETDKKGNKKEYTTWQKIEDLEDQIHQKNIAVKCATSVHTNNGYCKCKNCEIQRRHILQFNLKYLKDKLNTFTIDEYKASWRNSQIRDTQIITKYALPYLKTVFKKVSVEKGSITNAFKEIYKVKLTEGKKDRSVHSHHAQDAAILTLIPPFFDRDKILEKYFREKEIDYRRCYHEKPKDWDNFSASYILGIENNVLINNLSENKTTLPTYKIVRKRGKKIWLDKEQNIPMIAQGDTIRGQLHGESIYGAIKLPLRNENNQILFDDEGKMLLSEEPILVIRKDLKYKKDANSTGFKTLGEIENAIVDKDLFKVIKQQVEDATDFKTALENGIYMLDKNGNKVNKIRRIRCIEKMKYNTAIKVHEHTTKSDKDYKRHTLAKNGENALCLFYKNEKGKAMQILSISEVAELRYKNDKQYFHENDFKETLTGRGKNKVSIPLYAVLRNGCKVLFYKNTIEELNDLSQSELSKRLYKIYQFEKEVRNNSIKYRMKLKHHLAAGIDTELKKVHKEYSSPDFALNQVFLRLSKGQWNFAIEGKDFEMKLDGTIEFKD

SEQ ID NO: 53 - protein, 1046 aa, synthetic construct
MVCMPLVFGLDIGTTSVGFAVIEHDSELATGKIHRLGVRIFPEARDPKGVPLNQERRQARLRRRQLRRRRERRRLLGDQLRAAGLLPSRNSPDWDRVMKRDPYDLRRRAFEGETLSPHEIGRAIYHLAQRRHFRGRDIDEVSDTADDAAGDADEKKATSAREQTVQALKREGKTLGAWLSARGPHERKRGEHATRDIVEDEFDTVWMPLVPEPFRSSVRDAIFVQRPVFWRLNTLGKCRFVPDAPLCPKGSWLSQQRRMLEKLNNLALAGGNQRPLDPEERQAILSRLQVQASMTWPGVRRALAPVYRARGEPGEERALKFNLEEGGEKKLLGNPVEAKLADIFGSDWQEHPRKQEIRDSLPRRTWQADYEQVGDQRVVILPKAERTTRRAEVVQNFVAEFGLSNDQAAKIETMKLPSGWEPYSIEALQAMLPHLEAGVRFGELVNGPDREEWRAKTFPGREQPTGEVFDRLPSPADREEREHVASLRNPTVARARNELRKVVNNLIDLYGKPDLIRVEVARDVGNSKRQREEKASGIRRQERRRKAARETLQQNGIAEPSRAVVEKWMLWEECGHRCPYTGDTISFDALFRTGDFEVEHIWPRSLSLDNSFRNKTLCRKDVNLQKGNQTPYEFFRSNEEEWDALANRLAGMKAARGGTGMSPGKIRRFLTPSIPDGFAARQLNDTGYAAREAVAYLKKLWPDQGPEAPVKVFAVSGRVTGHLRRLWRLNNILADDGEKTRADHRHHAIDALTVACCHPGMTQKLSRHWQEEDDPRAPQPHLPPPWETIRRDAKSAVAAIVVSHRVRRKVSGQLHKETIYRDTGEEIAGARGTTYRYFVRRKAVEELKNSESERFNGTRIIDIVDDGARDIVQIWVDKHGGDPGAAFVDGYPKRGRKGPEIRKVRLRVKQQIELMTKASTGYADLGNNHHIAIYRLADGTVDYDAVSLLEASRRKARHEPVVRRERGDGAQFVMSLSPGDTLQTSENGEAKLRVVTGVWSNGQIVMCDNLDAAKATETRPGAKTIVSSDGRKVSVDPIGRIRPAND

SEQ ID NO: 54 - protein, 1338 aa, synthetic construct
MAKILGLDLGTNSIGWAVTETDDYQNFSLLDKGVRIFQEGVKIEKGVESSKAAERTGFRSARRIKYRRKLRKINTLAVLAKYGYCPGIDTAALRNWRYKKIYPSSELFRNWQKTDEATQKNPYHFRAIAAQTQLDLTDEHNRQKLGRAFYHLAQRRGFLSNRLETTKENNGAVIQAIDELSEAKAQLTLGQYFYQLYTQKGKIRKHYTHREKHYLEEFETICRVQQLPGDFTSELRKAIFFQRPLRSQKALVGHCPFEKNKARCPISHPAFEQFRMLAFINSIKIQTPGDELLRALSQEEKTQIAPLFYRKSKEHFNFEEIAKKLCPKNTLYLYFKEKEKPEVCYQFNYSMNSSVSGCRTIAQLREIFGEDWEKSINERYTLTKQKNGKKSSDEVINDIWHVLFSFDKTEKLKEFASLRLGLEQSMAEKFAEIKLKRDYASLSLKAIRKINPYLQEGLLYNHAVFLAKLEDLIPRSVWSDDENKALIKDEIRLIIESQNYEKQMTDLVNGIVKINRDDQASWSENPYWQEALQNDLNKKLASYYGQRRWDEMNTDDKDSLRNELFIRVKKQMQANLGRGSFAKTQTIEERIKNFISDQFEIDESQLEGMYHPSAIEVYREARRSNDGNYYLDSPMISAVRNPMAMRSLHQLRRVINELLKEGTIDRDTKINIEMARDLKNANERKALQRWQKARENERNAYREQLKKDILAATGKEIEPSDRDLLKYQLWEEQNHMCLYTGAYIGLAEFIGDSPKYDIEHTIPRSLSFDNSQENLTLCDSRYNREVKRNRIPSELPEHSQILERLKDWENRIEETQRNIDKAKFRSKVSIEKNRKDKAIEDRHFFQFEHNYWQGKYKRFVMKDVPEGFKNSQLVDTGIITKYARLYLKTVFRQVNTVKGKTVADFRKLWGIQDEFESKERSNHIHHCMDAVTMACISQDAYQRLAKAYHDWEENRPIQRSDMPQVEKPWPTFTEEIKKLEEEVLVSHYTPDNLPKKTKKILRIRGKKQYNEQGEPIYQQGHSVRASLHKDTCYGAIKQTAPNKKGITEEQTVYVVRKAVDSLTDSDIQNIVDCRIRTLVEEGKKREAVLRKELEKAEKRLRDAELPEIQEQWQHEVQSLHEEIRRLYAIPNHDGSFTPIKKVRCIARTVTDPVFPNKKHRDERKKKSLQQSQKEYKRFRYYANDGNYLIALYQGIDNKGKIRRDFIVINNMTAAKYFNNNDNENTIPEIHPKSGLPLQYTLKTGTMILVWKDSPEEVWKSNKNPLTIRLYKLVKFDKSGRLYFRPHTEARPANELKEEYTFSLDRFVEQLCFSSSKFTALVEGYDFTISPTGKITRLK

SEQ ID NO: 55 - protein, 1886 aa, synthetic construct
MKNILGLDLGTNSIGWALIEIDHENGIVRILGLGARILPMDADEINDFQSKGTIKSTTAQRTDDRGVRRNKERFLLRRDRLHLILNLLNALPEHYKIEIDFERNGEKCGQFKNYKEPKLAYIRNRANDKRFDFLFEDSYNEMLNEFGVEYKKRKLIPRDWTLYYLRQKALTQKIALEELAWVLLSYNQKRGYEKNEVEDKTSKENEIVEVLDLRVKNVTEIVDKEGGKYFKVELNCIDNIIYNEYSDIQMTFENDLKEIKVITKIDDSGNTTSKEFSVLDIFSLKIKEVNYEKQEDKHNYTITYLNGWKEIKTLKKYTFRYKNVINKPFEYIVETVYDEKGNIKPILGKFRKLREPDFGDNSNDWTLLKKKTEKEALAYNIENGYINKNTGEPKKYLSPQIFHILKNDAQSGNRTKIIGGMFQVIEREFYREELAQIISTQKQYYTNLNDRKTFEKCVQLLYPNNEAHAKSLMANKKAIQQLLIEDILLYQRPLKSKKSEIANCKYEIRQWKDAIDKKTGKPVEEIDIETGEICIKKEPIYHKVVSTSHPYFQEFRIWDKLHNLRLIQIEKEAEGKIKTNVDVTDDYFKNDTYQKLFQLLNNKSTLKQSGLLDFLKSKFEEKNENAKNFVWNLPENEEIKGNETRVSFTIRFKRCGLKDYNKLLTKDKEIALWHYLYSVSYKERIADDFKSIKSFFSKFLDGVDIPDIVKDNLIKDFANYPKFASKYCAYSEKALKKLLPFIRIGEFNDSFDITEFSSDLNAINYDKSMILSYIKYNPIDRMKLSPKESIDLEIKRRNLYKAIWEHSINERIKEIRKRLDTIDFEVDEVDFSKVVSNDSNNGNIPFPKGLFNAFKALKTSDKPKEFTNLNLAQASYLVYGRHSELAQAKYWTSPKQIRDELHQELKLHSLNNPVAERVILEMIQIVADIWDYYGDGKDKFFSEIHLEVGRDLKKSAKEKQNIINYQNENKAQNKRLRQVLEDFLSKSPYNAIPQNSDHFERLKVMEDGAAHTKNTDKNFFIEKSYTKKEIDEILKKPNITQGDFDKYKLWIEQGYKSPYTNRIIKLTDLFNGNKYNIDHVFPQASVTNDSLINKVVCEREINTLKSKQTGRDFINNPSQRRISCEAHKTKENPKGIVEIVNDNTYVSIVKTQFSGHKRQILLSKEIPANFTNSQLNNARHIARKAMELLSHIVREPGEVEFRSKNVLPVTGEVTSKLKKAWRLDEVWRELVAPRFMRMNELTKSNLFGQEQISKSGAKYFDCNIDNSIREKDPSYDIKRIDHRHHALDALIVALCTEDHVNYINNINANVTSEDHRKQKQIEKYRETLKRKIMFSKPNKENPKVKDWFYMLPGQRREAEAETSTIDTVLRIFFYFKDTGFNMDYKSMVLSALEHTIVTYKQNLRVINKTVNRYNNTPNKNKFEIQKDKEADNQYNWAIRRSLGKDTYYGKVNLKLKEKNKLHSMLEAIFENVTIIVDKELKKQIIEIKANSNLKHFKKKIKELYRDNPTFDFYYFTDTTKDSKKIASREFLSDKFYSKKILEITDTGIQKILLNHLKQFDTVKLRFEEALQYFDALKEKPELESILNKGDSKFNTLDDLINYLKSHENKYDKVDYSELNVFIEQVHDRDFRADETFKDIIDEHPEIAFSVDQIDLMNQAENIKKLNDGKNHAPIRKVRSSRGFGNQRQVSDDLQSVKSKQYIVNDAGSNLYLGFYEGVYEDNKITERKFQDIGLMELIEILKQDKSKRLNPLPQSILDERKNTEYNWLFTLSPLDLVFVPNEEEIENPSLVNLNILNKEQIKRVYTLNNFTGGDIYFSPNSHAKSIHEKEVDLKFDTKTSKLKGSFPDKTTSISSGSKTNQIKNICYKLEVDKLGNIPKPNKLRID

SEQ ID NO: 56 - protein, 1063 aa, synthetic construct
MRERLGGADAGKRSYRLGIDLGANSLGWSVIWLDEDKPNGLGPAGVRIYADGRDPQSKTSNAVTRRVARGARRRRDRYLVRRKALMEALVAAGLMPADAAARKALERLDPYDLRARGLDEALALTHFGRALFHINQRRGFKSNRKTDGQNEEKGAIAEAGKQLREQMLAAGARTLGAYLARRHARREAVRARNVSSGAKAAYDFYPQRAMLEDEFGQLWRAQAKWHPELTQALYDQLFEIIFYQRPLVSPPVGKCALDPAKQPDDLEGFRCSWAHPLAQRFRILQEVNNLAVGLVGEAKEALSPEQRQKVYLSLRAKKSMSFDGLRRLLKLTAEQIFNLESEKRSKLEGDQTAWRLADKKRFGKAWHSYAPERQAAIVERLLEEPDEQALVEWLMAETGVEEARAWVIADSPLPESHCRLGLRALKALLPLMEAGKRYHEAAAEAGYDHARMPTGEIRDRLPYYGEILQDHVVGSGDSRDPAEKRWGRLPNPTVHIGLNQLRRVVNALIKRHGPPSQVVVEMARDFKLSPQALRKLELEQAANQKKNDRRREQLEALRLPVNHGNLLKLRLWEELNETDEADRKCPFTGETISIRRLLSDEVEIEHLIPFSRSWDDSAANKTVSLRSANRAKGNKTPFEAFGSSPTINGRHYDWEQITARAANLPGNKRWRFDPDALQRFEAGGGFLARQLNETSWLARLARQYLGSVTDPRQVWVVPGRLTALLRGKWGLNDLLNLAGGVKNRNDHRHHALDALVAGMTDRGLLQRMAREYDEVRDRIEVSAPWVGFRQDAARVLDAILVSHKPDHGAQGQLHEDTAYGLLEPPEEGGNLVYRKALKDLNEREIGRIRDPALRSELEHAVASGKAAGKALPEVLQAFGVAWGQRHSRAAPGKEHGALRHVRLTKVEGADYLVSIADRDGQAFKAYSAGDNHCVEIYETPDGRWEGEAITVFQANRGGYRAAWRKAHPQARPVMRVHKGDCIRVETEAGPAFLIAHRLDAAAKRFKLAPHNEAGALDKRHNDPDDPFRWRMFSYNKLRSLQAARVRIDEVGRPWRQTAKGPGS

SEQ ID NO: 57 - protein, 1122 aa, synthetic construct
MEVKKMARHLTTLGIDLGTNSLGWCLVETIGEPGEAGEGRIVDIGARIFSAADMAGRDAKSKESLAVARRLGRTTRRQRDRRLRRKSRLLDQLTEFGLMPAEKPARERLVRETGDKEGGDLSASVYALRAKALDEALTPHELGRVLFQLNQRRGFKSNRKTDGKDNDAGKIAVGVSRLHRAMDTERARTYGEFLHKRRLAGKSVRTRLRPESMAEFDNDPEAKGDGYDFYSDRSELENEFDQITAAQASYHPTILTSERIAVLRDTILFQRNLVPPKVGKCSYNPDETRLPKAHPLFQQFRLYKEVNELALIGEDQNPVKLTPDQRDTLVLKLRKAKKAKFTALRKLLKLGPEFRFNKETDSRTELEGDVVSAALSHKNCFGPNWTAKSIDEQWGIVEQLRGEPDPDALLKWLSDSCGLDDDRIEAVMKVSLPEGYGRLGPSALANLLDALKHDTDDNGRVITEAAAAIEIYGRTNAEDDPDRKAVKTLPKYQEVLTRHIPPGEGSVSEPPDNDDPGYDRHMGRITNPTVHIALNQLRRVVNAIIRKHGRPDRIAIELGRELKLTDKMREEVNRTIARNTKEAEARSDKLQELGQPDTGYNRLRLKLWEELNPDQPLNRVCIYSGKPISMREVFTAEVDVDHILPYSKTLDDSQANKLLCKARANRVKRNRAPAEVGEWDAVYDDILARAGNLPKNKQWRFARNAMDRFADENGFAARQLTDMQYTSRMALSYLAVLYPAEQANIDGVPRRHNHIRALPGRMTEMLRRKWALNEILHDHNFGDPVKPKNRKDHRHHAIDAFVIACTSRSLIQRIAAAAEEIEAEGSEKVLGRVPEPWPGFRDELRQKVLGSVVSHKQDHGTISQAGYASGKGKTAGKLHNDTAYGLTGETDEKGNELVVHRMPLDDFKSPKHLMAIRDEQLRDTLWEATRDLSGKDFKKALRDISSSDRLNGSVNPYKELRRVRVLEPLQIIPIRNRSGKVYKGYKGNSNHRYDVWQLPGGKWVAEVVSTFDAHQPGWTSKVRGDNPTAKKVLSLQQNDMVAIERDNGRQICRVVKFSSAGQLTLAEHNEAGALKARDADKTDPFKYVYTSGTGLGKLRARQVRIDEIGQVFDPGPHWTDKN

SEQ ID NO: 58 - protein, 1009 aa, synthetic construct
MKSTVLGLDLGTNSIGWALMERNEENNPVGIIDCGVRIFQEAVEAKTRTPKNVKRREARAARRLTQRRTMRKRTLKNALIRIELLPDNMEECDTILRNTVEYDPYLLRARGLDEKLTPFELGRALYHMNQRRGFLSNRKSGKKKDEGPVKQSIQYIEKQMEQSGYRTLGEYLFHQEEKRNRRTDSKLSQKQTEILTFTARSMYEKEFDLLWESQRHFYPEQLTDAKKNTIYKIIFFQRPLRIQKHLIGYCRFEPGKHRAAKATLTAQRFRILQDVNNLQIKNPLTREFRPLTEQERSITLRELDKTKKLEWKTLRRKLGIHEGELFNLENGGKPHLPGNSTATTFRGVLKKEWDQFSEKQQEQLVTDILTIDDENGFLNRMKDHWNFSDEIANKLATTELVNGYVALSQKAMKRIIPFLEKGLTYDKACEEVGYNHTDQKSSKGHLEFLDSPPSIPNPVVQKALWEVRKVMNALIRKYGKPALIRIEMAREMKQGKKLRDATNKRNREMETYHKKIKERLQSEMNMQQPTRDDILKYKLWDECGMTCPYTGKPISLSMLFSPEVEIEHIIPYSRSLDDSYMNKTLCLTHENTNVKKNMTPYEAYSHDEKRYREILLRIDKDHMPKMPWPKRKLFEKKEVDTDHFINRQLTDTSYICNEVKEYVKRLGVDVDVTKGGATAGLRMHWNLNTILARQPGETAKERSDHRHHAIDAIVTTLTTRSMFQFLSRIAKSAPYMGGLYDRRFQIPPPYEGFRDDVYCQIQKIVVSHAASRKISGALHEETALGLAGEGKKSGYVELVHRIPLNGNITKNQIEAIRDDHVKAIVKRRLAEFSDDPKKAFADTVFHKDGKTPIHTVRITEEKSMDTLTSVKDKYDMPYKYFALGSNHHVEIFENEETGKRKGIFVSVMEAARRVRIDHTPLFDRSYKEGWRFVMTLMINDMVIVDVDGENRIYRVQKMTGAGAKSEMTLRAHTASTLTYDNERLIKTPNTLQCKKISVDPIGQIRRCND

SEQ ID NO: 59 - protein, 1097 aa, synthetic construct
MVAVNLGRRTILGLDLGVTSVGWALIEYDGQKPVKILATGVRHFDTAATNAKDFAAGTHKTKNADRRRPQRHMRRQLNRRKQRKKQAFQALQAAGLLPAASATSEDQRHKIIRQVDGRLRRKWMVKGDHRKQQLLPYLLRDAATRRQVTAEELGRALYHLAQRRGFKSNRKTDRDEDDKSTVYEGIGTLESELQAAGCETYGQYFATLDPQRNGCRIRGRYTSRQHYEREFDKIIDAQRPFHPQLAQHAKAIRRAIFFQNPLKSQRRFLGSCELYGNRRRAPKACLAFQCFRICQQVNNLSLVLPNGYRQPLAPEERETLYKALQGKHKLTSAGVLKELGFKRNSGHAIHGIGESGKEIIGNRTACELRGALGDVWDGLRDEQQARLVDEITQFTNPEALARRLAKEFGLSLQQATAAARARIEGDYASYSRVALQELLPLLKAGRTLPSAIEEVCGHSRRPRAQVATERGGRHSRNPETPLLPPLGATRCGRHVRNPVVIRCLTELRKVVNHILRDPALGRPDEIRIELMRDLKRSRKVREARHRTIKKNTDRNKQIEHELQTQPETERFFRTAPPRRSDVDKWKLYEECQGMCPYTGQEISPGDLYGPNPQFDVEHIVPASRFPDNSLANKTLCEHKENRERKKGQTPWEAYHETDQYAHILRRVKAFKGPLSARKLELFQRKELPAQMSAQQLVDSQYSAALAAEYLGEVYGGQVDSAGRRRVSASNGRVTAHLRALWRLNEILGSESAEKNRADLRHHAVDALVVALTTPGAVAALARFVQEGESLGLDNPFAARHRRRAKPFDLPWAAFREEAEREILSIVVSHRPEHRLRGQLHKDTMYGAPGRRGAEDPNRPTQRVALCDLSRKAIEGNVLVSPLVRRCVLEKLRSLDQPGKPASPEVFKDTANLPEYPGRNGQSPHIIRRVKTYRSASKTIHVRNGNPGGRYEPGGNHHVPILVEVDDAGHEKHDGEGRSLLSFGKVVSRFDAVRRLTQDNTEVVNRVYDPGLRLKFTLMRGDLVEMADDDKVRRIYRMMNLSDGDYRFRAVHLAEGDNNSLKERRDLYQRIRSNTDFSKRFPRKVIVDPLGRVHNSGG

SEQ ID NO: 60 - protein, 1402 aa, synthetic construct
MSNNYYLGLDCGTSSIGWAVTDETYNIQKAKGKSLWGIRLFENAKSAEERRGFRATRRNTYRTRARLDLLDELFENEIDKIDPQFFQRLKDSKYYFEDKNNINDKNTLFNDTNFNDIHFHKKYPTIFHLRSELIHSNKKHDIRLVYLAIHHILKNRGHFIYEGQQIENVQNVENLFQNLKLIFSDLFPDITISYPNGISEIENILTNKTINNKLKELKYNISVDSDNEKIAKSIQTEITKALNGNKVNILKLIPITTLSEEDLEYKDFSFSSSSYEDQELAIKNTLGLDNFEIISCLKEIYDWALLFSILQGKHYISDSKIQTYNEHKKQLIELKKLIKKYCPEKYSEAFHSTKDKLFNYSAYIGHGLDNGKKNKGEIKSKCTIEDVNKYFKKLLENAHKKYNEDKLLNEIYSKLETNSLLQKAINSDNRVIPYQVNLIELETILKNATKYLTFLNEKDNEGYSINEKIIAIMKFRIPYYVGPLVEKTNDNKEYQKFSWMIRKENSTGKILPWKFTDQVDLAACGNEFIKRMARKCTYLPNENVLPKNSLLNSEFTVLNEINNLKINGEKPSLDLKNEIFNLFKNFKTVSTNRIKDLIISKGIFNKRTEIIFSGIDKTFKSSLSSYIDFKEIIESEKLSIPEIELIIEWATVFSEGQKILKEKIEENFENKLDEKDIKYILSKCRAYSGWGHLSRKFLTEMYHIDEYGECKNIINLMKETSNNLMELMSINYTISKSVEEELMNYNNDYDTWSYENLIAPLPVSPLIKRSIWQTIKIVNEIRQVTKKDPKKIFIEMARGPEENQINQRTNSRKNNLIFQYKNLTENEEALNILKSLENKSDADLRKDKLYLYFTQFGRCMYSNEKINLDDLLISNKYDIDHIYPQKNIKDDSLNNRVLVLKEENGKKSDRYPLSIDIQNKCKSHWTFLYKNNLITKEKYNRLIRKTKLDNSELESFIARQIVETRQSTKAIAKLLEKLCPSSSIIYSKANSVAQFKKDYHIYKSRSVNDLHHAKDAYLNIVVGNAYYTKFTKDPKFILKNENKDSYNISKLFYYDIKRNNYYAWHMDVNGKARREEKNQKENSQDFLKFPETGTIVRVRETLSKNNILFTRQTFQRSGKLSDSLIVKKGANNDVLPIKSSDIKMLDVEKYGGYNKIAKAYFFIAEYTNNNKRIKRFFDIPIYKASEIENGKTTLYEYCINILELKDPKIIIPKVLINTKIKINDFLYEISGAMGDAIGLKTAIPLIISNKNYNYYFYLEKYLEKMKNYLRFNKNISEEELTSFSENQMFKYKISSEKNLELYNELNDKLKNSIFKNRVSNSIKNNFEENIDLFINSSIYNQAIFLEQFITLFACKYGNVDLTLIKGAKNSGTPKISRNINSNITFIYQSITGIYESRKEVKI

SEQ ID NO: 61 - protein, 1090 aa, synthetic construct
MARILGLDLGTNSIGWALIDDKENKIINTGVRIFQEGINRDTKGGELSKNETRRNARQLRKQYFRRSLRKKLLLKILKENQMCPIEENDFSTWIKMNPYKLRALAIHSKLSLTEIGRIFFHIAQRRGFKSSRKSGKEDGKIYSGLKESGTIGIDQTQENIAKGYHTLGEYLASIDPSEERLRNRYTTRRMYEQEFELIWDKQAQFHPKTFTHSLKDKLGYEKEGIIFYQRKLKSQKTNIGKCTLEPNKHRCPISTPVYEEFRTWQFINTIQYDQKRLSNDEREVASQFFFNKASFKFSELKKKLGLSEYNFNYDDDQKIPGTSTISTFRKLFTTNIWEAKTDKEKDIIWHIFFSAEDTDWLEEYAKTNWNFDQKTSAKLKNINLKQDYSNLSRKAINNILPFLKKGYLYNDAVVLGGIRNAIGGEKFDALEETEYNMIIDGYFAAKKFKNKEGELIELVKNFLIDHYHLNDKALKKLYHHSQDTESMLVVSKLPEPENLRNPIAQQAIFELRTLINKLIENYGKPDTINVEMARDLKSSKKQRDEYRFNQRRNQEKNDEARVEVEKFGLKPSRNNIQKYLLWKELEAKNGIAVCPYTGKTINEEDALGENNKFQIEHIIPYSVSLDDSFANKTLCDAKENQKKGDKTPYQFYGGDKKDWQMRSERAFKLLPYHKAKKFVSTKEFQLDDFIQRQLNDTRIISKAAKDYLKQLGVKVSVLPGQLTSELRSKWGLNNILNPEEGKKTRDDHRHHAIDALTVAATKQSFLQEMSKWNKYNKSYDLKDFPKPWKSFFEDTQTSINNVLVSYHKQHRTITKANKTIKKDGKKYKSSGISARGQLHKETVYGQHLSSNGEKYYHVRKPLNTIDNKAKVDKIVDPMVRSIIESFLRGKGINVDEKYKLDKDIFFKINEDTGQKETLIYLPNKNGSPIPVKKVRIKEFSTGAVKLKDHINQWVEPGNNHHISIYKNGDAYVEEVVTFWEAVERKKQGLPVINKTPKNGNEFECSLQINDLFLLNINEVDINWEKPDQNYLSKFLYRVQKLSASYYTFRHHLAATLEYKDEEITIQSFKAWKGHNPLKVKINHFGEISRF

SEQ ID NO: 62 - protein, 1355 aa, synthetic construct
MSKILGLDLGTNSIGWAVVETENNKTFSLKNKGVRIFQEGVKIEKGVEGSKAAERTGYRSARRLKFRRKLRKIEVLKALIKYDLCPPISGDELNIWRYKKIYPTNKEFRNWWLTDNNDNRADRKKQTKNPYYYRSKVATDQLDLTKQEDRYILGRAFYHMAQRRGFLSNRLENTKESDGAVTQNIKQINQQKGDLTLGQYFYQCYCKGEKIRNQYTDRLEHYEQEFNHICKLQGVSDEQKNTLHKAIFYQRPLKSQKGLIGKCPFEPKKSRVAISHPAFEEYRMLCFVNSIKIKLPEDDKLRFLTEKEREKIIPVFYRKSKPHFDFEDIAKQLAPAKQYKFYKAKDKNPEDYLFNFNMKTTVSGCPVSARLKSIFGDEWKELQIKHERKDHSKSIIDIYDVWHVLMTYDSEDKLFEFAKCKLGLGEDKTKEFVQFNLPQGYGSLSLKAINKILPFLQMGLIYSHAVFLANMANVIPPILWNDPENKQLIINEIKELIQSQNEEKQITDIVNGLIKINKDSNAVWSNEAEKAFKNDLLQNIKAYYGSTKFDSFSIAQKSSIETNAFELLKTQMQKKNGVGEFAKVKRIDERIKDFLIDNFNDDIKPENLYHPSAIETFKPAQKNNEDKYLLGSPITSSVRNPMAMRALHQLRKLINQLINDDVIDEDTIINIEMARDLMNANERKALQNWQRRREDERKKYAAEIVKHYKASGINAEPSNNDILKYQLWEEQNHICLYTGKNIALHQFLGSNPEFDIEHTIPQSLSFDNSQVNITLCDSKYNRTVKRNKIPYELNNPDILLRIHHWKKEYENIDKDIQKCIKNARGASTKEDKDRHIIRRHQLTTQRNYIREKYQSFTRKDVPSGFKNSQLVDIGLITKYARLYLKTVFDRVNTVKGTTVADFRKLWGLQNAYETKARVNHIHHCIDAITIACMTKPQYDKLAKFYHDWECLKEEGVDKKPVFEKPWPTFTEDVKGIENEILISHYTPDSFAKQSKKLLRKRGIIQKDKNGNPIVLKGDTVRGSLHKETFYGAIERTQANKKGELEKVIKYVVRKKVSDLSDTDVKNIVDDRIREIVGNARNEEKKIQKEIERLKKDLQKAEEHEEPAINDKICVLQTEIEQLYSLPNKKGVPIPIKKVRLLQPSVTNPLCIKKQRDVSTKKPKEYKQNYYAANDGNYLMAIYEGKDAKGKIKRDFEIVNNITAGEFFKQSVQGDLKPQGISTNGGLIPKQKENGKLVLPYKSSIKIGTMIILWEKSPTEVFDLELNEIKRRLYKVVGLSAQKLKISGKSYNYATIVLRHHQEASSSSDLKTYDGAFKRDETYMGQRKLNHNQFNALVENIDFDMNTKGTIKWIKH

SEQ ID NO: 63 - protein, 1574 aa, synthetic construct
MAKILGLDLGTNSIGWAVVDSDTQKILNTGVRIFPEGVEPKTIGQGDKEQSKNATRRDKRQMRRQFYRKRLRKIKLLQVLIQQEMCPLTIDGLSKWKNWSRTEKAEGRKFPDSEKFIDWIKLNPYDLREKALEEELTLHELGRIFYHLIQRRGFLSNRKGTEDSTIFTKGKPDENILPINDTKAKIGNRTLGGYLNSIACKDGEPYKNITDENGKEIRVRGRYTVRDMYIDEFEKIWSVQKEFLEIDNKKVEAKRARELRGTVNNKRNKNKIDHLKIKFGESNVDIKIDDKGKTKVITTEHISLKEFLAGRIDRIKDEAGEETLQFKSNESVLFWQRPLRSQKGLLSNCRFEDNLPVIKENGDFLLKPNGERQTRGKKPCPISHPEFELFRAYQFVNNISYGKNQKLTPEQKKEVLALINKNDGNFDFSKIPDALKLNYEKFNYGDKQKVAGNPTIKALKPLFSDDIWDKHYEEIWHCFYFYEDNDKLFEKLKKDFGFKKDIEAVKKVRIKVGYSNVSLKAIRNILPFLEKGYQYDRAVILGGVKNAFGKRWEFFKEFHDNIEKEILSILREENKDGEAIEKIKEHLASPVFNYGFEKDDPHFLHLYHHSQEVEKQDELNSLVPIVENLRNPIVQQGLNETRRLVNYLVQKYQKEFGSGFHFDQIKVEMGRELRNNKDGRQEMSFRIRENEAKNDDARQRLAEYGLQPSRENIQKYLMFKEIEERSGKAQCPYTGKVISVSDLLGRDNAVQIEHIIPFSVSLDDSFGNKTLCEANFNREKSEKTPYLFYKENPDPNLWGVTSWEAVEERAFRLLPYRKAKKFTAKREFEKSDFIQRQLNDSRYIAKKSVELLSHICNDVRVMPGQLTAELRHLWGLNNILQPVQNLGEHTFDVDGENSIAHYVVTNETGEVVSIHRKQNIRPSTNSNEILVTGNVNKKKFTSKYFKIDMETPDLPDGKYWVKLNIGDNLHVIPKYIDKPEIDEKSIVFKGNVEKGYFKNDTYGRIKADIGDGSYWAKFEILNVKFETPVKDNQPKIKRNQVMLFGNVLNGQFKCFIYQCETNLRDGKYWIILDLNPASVEFIRSVNPKPEVQVNELLITATIDEDGVLNADIDKEYQVQTDSPTGKYYVVMDIITREPKLYSIENEPPKLENGQQLIEGNIWVDKYTGEIKFDPKKNRDDHRHHAIDAITIALTEQGYLQRLSTYNAQRKEKQRQKLDSTEKFPEPWNGFTNDVARAASAILISHKKNNKTLTKTKKGFGVRGQLHEQTLYGKKDYCKSKEFTSRVSIKKLKFKKTKGQATYLDDIIDAGIQNAIYKTIKENLKNEEDKRIIEDILKRYHNIGNIKTKKAQEQEAKELNILRTKINSQVEKILQEENFFLKNEGNRYKKLKKESIEERHPVPIKKVKVLKVLGHGGHLKELSSYSKKKNRVVKGNQYVNPGNNHHILIYLNSDGKLSQEAIQLWAVIERKSQGDEIYQLPEDGVSIVTTLETNDMFILGLSNDEFESNINNRAFLSRYLYRVQNISDMYYNFRFHLASTLDKKEEWIYIQSLSAWEKLNPIKVKIDILGNIKKV

SEQ ID NO: 64 - protein, 1516 aa, synthetic construct
MSKILGLDLGTNSIGWAVVDSDLQKILDTGVRIFPEGVIDKGKGEKEKSKNSSRTDKRQMRRQFYRKRLRKIKLLQVLIEQQMCPLKVEELAKWKNWDRTKKTEGRKFPSSEEFDSWIKLNPYELREKALNEKLTLYELGRIFYHFIQRRGFLSNRKGNNESTIFTKGKPDENILPINETKEKIANQSLGKYLKSISYNDGVPYKTITDESGKEVRVRGRYTVRDMYIDEFEKIWKVQSQFLELNKKEVKATRIRELKGALTGKRNQNKIEYIKKKFGDKNVEIRTASRGITKLVTVERLSLKEFLAGKIEEVQNEKGEKKLVFKSNESVLFWQRPLRSQKGLLANCRFEDNLPVIKENGRFLLKQNGEIQTRSKKPCPISHPEFELFRAYQFINNIYYGKHNKLTTEQKEKVLDLINKNDKNFDFSKIPDVLKLTYEKFNYGDKQKVAGNPTIRALKPLFEKEVWDKSYEEIWHCFYFYEDDDKLLEKLKRDFNFKKDIATLCKIKLKEGYANVSLKAIRNILPFLKKGYQFDKAVIIGGVKNAFGRRWEYFKKFHDDIEKEILSILREDNKEGEAIEKIKEHLASPVFSYGFAKNDPHFLHLYHHSQEVEKQEDLSSQLPEVENLRNPIVQQGLHETRRLVNFLMKKYQKEFGKDFYFDQIKVEMGRDLRNNKDGRQEMGFRIRENEAKNEEARERLAEYGLQPSRQNIQKYLMFKEIEDRAGKAQCPYTGKVISISNLLGNNNAIQIEHIIPFSISLDDSFGNKTLCEANFNREKSEKTPYQFYKENPDSDLWGVSSWEAVEERAFRLLPYRKAKKFTTKQEFEKSDFIQRQLNDSRYIAKKSVELLSHVCKDVRVMPGQLTAELRHLWGLNNILQPVQNLDKHSYDVDDKFSIPHYVVTNNNGDVISIHRKQNERPETRANEILATGYVDKQKFTSKYFKIDMETPDLPNGKYWAKLNVSKSIRVIPKFVDRPETDENSIVFKGKIEKGFFKNDAYGRVRTKLADGAYWAKFQVLNAKFEIPEKNKQPKTKRNQVMLFGNVLNGEFKCFIYQCQTNLCDGKYWIILDLNSDNVEFVRSVNLKPEIKGNELLLTATIDEEGVLKADLDKEFQVQTTEATGKYYVTLEIMTHEPELYAIENVLPKLGKGQQLIEGNIWVDKYTGEIKFDPKKNREDHRHHAIDAITIALTEQGYLQRLSTYNAQRKEKQREKLDSTEKFPEPWGDFQKDVREAAAEILISHKKNNKTLTKNKKGFGVWGQLHKEYVFGKRQAPGQEKGFHRRTKITELKNNKHVGKVVDDAIRNIIEKHLQDNFNIEINNPKGYSIPDNAFFKDGEWQIFLPNKNGEKVPVKKVRIKEKIGHAAQLKSGLNQFVNPRNNHHVLIYKDREGNLKEQVVQFWTVVERKLQGEEIYQLPFDGAAIVTTLEINDMFLLGLSNDEFESNKNNLAFLSSYLYRVQKFTSGDYYFRFHLASTVNNDVERIYIKNFLEGKTGWKNYNPIKVKINVLGQIEKI

SEQ ID NO: 65 - protein, 1345 aa, synthetic construct
MGNILGLDLGTNSIGWAIIKTSSNLNFELLDKGVRIFQEGVKLESGKELSRAGERTAYRSARRIKFRRRLRKIETLSVLSQFGYCPELSDAELRDWRYKKNYPKNDAFRQWWLTDNEGDLAQKKFQKKNPYYFRNLAATQKLDMDIESNRFLIGRAFYHICQRRGFLSNRLDKNKESEGDMKQAINSLTDEMEDRTLGQYFYEKYQKGQKIRGHYTDRKRHYLEEFETICRVQNLPEDFIKVVHRAIFYQRPLKSQKGLVKKCVFEKKKSCCAISRPEFEEYRMLGFINSIKIQMPDEKEMRSLNRGERKSILPLFFRKSKDQFRFEDIAKKLAPKNQYAFCKGDKSGGDYLFNFPMNTTVSGCPVSSRFEELLGSNFMKISFAYLREDGRSSNFDIYDIWHVLATFDSTEHLQQFAEQKLQLDKGLAEKFSKINFRQGYASLSLKAIRNILPLLRDGMIYSHAVFLSNMKIVLGPAIWEDKDKRESIQNKVVAIIQKQNQQKKIAGLINSILSEPDNLKKKESDQWGYLLSEIKASIGKTSYAKMNEAERGALEKWALEKMRKMIVSSQPVAIDSIDDQIKNYLRETFNVSDKSLDKLYHPSSIGVYPPATEGENGNPLLPSPRINSIRNPMAMRALHQLRVVINELIREGKVCQDTRVHIEMARELNDANRRKGLQLWQKEKEKTHLEYSEKIKEHFKGAGINREPSRNEIMKYALWEDQGRLCIYTDKANNNIGIEDFLDNNPQYDIEHTFPKSRTLDDSMENKTLCEVDFNRKIKRNRIPAELDNHEDILERVKPWKEKYKALESQIENLRKKAKNTDDIGIRDWATQQRHKLTLERNYWKGKYHRFAMKKIPHGFKNSQIVDTGIITKYARLYLKTYFKNVDAIKGSLVSEFRKMWHIQPEDKKKERTNHIHHCIDAVTIACMTRNNRDRLAQYYARLESASNTSKTKPNVRYPWPDFVKSIHSIDKETLISHYTPNVFLRQTKRKVRVRNKIQRDKKGDPMFQQGSGPRGSLHKGTFLGAVEDITLNNNGLVETKIRYACRKPLMDLKDVQLKHIVDDRVRKIVEKARKKEKELNKEIIKQSGLVKTTDNSEKKRIEHELAILKKKKENLYTMPNKNGSPIPIKKVRIYTRITNPIGIKDQRDQSKKAHKRKYYAENDEYYLMAFYEGKIAKGKVVRDFELLNNFDAARRLKTFSPKEISGPASPAVPEAKCSGKTEIALKAILKKGQLVILKKKDSEDIFRLPPEELVKRLYKITSFEKDGRINFRHHQTAMMHSSKGDDKDQMTILKYMKINNLEPSQIDFDNPLPWLRLSRTNWEFAVEGVDFKLTPLGRLVQAGG

SEQ ID NO: 66 - protein, 1400 aa, synthetic construct
MKKILGLDLGTTSIGWALVNESEIENESSSIIKTGVRIIPLSTDESNDFEKGKAISINADRTTKRGTRRNLQRYKIRRKQLLNVLKENKLIDNKSVLTETGPNSTHSLLSLRAKAVNEEISLENFARVLLAINKKRGYKSNRKAKDDTDGQAIDGIHIAIELYEKNLTPGQFVYERLKQDKKAIPDFYRSDLQNEFDAIWKKQSESYPDILTIKLKESLKNKNKGQSWKICEKPFNIVGIKQSGTVQQKKLELYKWRTQALKEKIDLEHLAIVLQEINSQINNSSGYLGEISDRSKQLYLNKITVGQYLYEQIKNNPHTPLKNQVFYRQDYLDEFERIWETQSKNRKDILTNELKEQIRDIIIFYQRRLKSQKGLISICEFERRDIEIEIDGKRKKKTIGPRVIPKSSPLFQEFRIWQILNNLKFENTETHTSYPISELDQDVSIREQMFDILNTKGKLSPKEVLNIVIEDPEKWEIKNFKELEGNSTNQKLFKAYSQIVESSGHSVNNKKLKESYADIFKTIGINPDILEFDTELKGNLFEKQASYQLWHLIYSYEGDNSETGNDKLYELLYNKFGFDKDYAKLLINISFQDDYGNLSTKAIKKILPYLKAGHEYSQACLLAGYNHSHSITKEDNERRPLDDILELLPKNSLRNPVVEKILNQMINVINAIIEQYGKPDEIRIELARELKKNAEERAEMTRQITKTTAEHNEIREKLKEIYPFNTGIRITKNDIIKHKLREELATNGYKTIYTNTYVPLEKLFTKEFDIEHIIPKTVLFDDSFSNKTIAVRDFNRIKSNKTGIDAVAEKYGNDSDEFKRYVNTVEKLYENNKISKAKHKKLLMTADKIPDGFIERDLRNSQYIAKKAQEILRKIAKTVTPTTGIITDKLREDWQLINVLQELNWEKYAKLELTDFEFNKEGKKIPVIKDWSKRNDHRHHAMDAITVAFTKPSLIQYFNYLSARKNEKHKKHSNIYAIEQKETFVNDKNKRLIKPPIPIEEFRAEAKKQLESILVSFKAKNKVVTRNINKTRKKSGENKKIELTPRGQLHDETIYGRSCHYTTIEEKVGSKFTKDYINNVAIKSQKEALLKRLNEFDGDAKLAFTGKNSPSKNPIYLDEHQSAKLPEKVKFVVLEESYTIRKEISPNLKIDKVIDKKIRKILNKRLKQFNNDPQKAFSNLEENPIWLIEPTEKSKWENPDKPKSHELGIPIKRVTITGISNAEALHNKKDHFGNKIADSNGKVIPTDFVSPGNNHHIAIYKDEEGKLYEDVISFYDAVTRVNQGSPIVWHTHPEHPDWELMFTLKKNEYFIFPDPGKGFNPSEIDLMNEENYHFISPHLFRVQKIGKKDYWFRHHLETKIEDTKKLAGITYKRMQSLESIKNIIKVRINHLGQIVKIGEY

SEQ ID NO: 67 - protein, 1400 aa, synthetic construct
MSSVKLGLDIGTNSIGWAIMKKEDGKYDFLKKVDENNEEIPTKGSYIFPKGVDAQEKSGAAIRRGFRSARRRTERIRRRKAATLKVLSENGLCPALSKEELSDWRYKKKYPCDNDEFIRWQRTGTKGGDRKSEKKKQPYYLRYLAATKDSLMNSEEGCYNLGRAFYHLAQRRGYLSVEEEQADEAIELFKQSLSTLINEQDTVLAFGEPFEAIADQYKSDAKVKSLAGKIRRQLKKKLSFLEIKRFVELQLSAKENLGKVASGINELTQKIEESGQPTLGCYFNSIYAKQHGNGKVERIRGRYIDREKHYLNEFNYICDKQNLDDELRGKLYDAIFYQRPLKSQKDLVAKCPLEPKRKRIAISHPLYEEYRKWESINRIKIKTALDDRLRPLNVSEKELIASDFDLVGDVSFEKLAEKLCGGEDFRYIKDKEKLEAEVEFNFPITTTFSGCPTIAHLKKVLGKDNTGKYWFYKLPLLNTGYKDEKDKKQISIEDIWHCLFVDSYGEKTKQQAREDFAKKHLEWVDAEKFAKIKLRKGYGSLSKAAIKKILPHLREGEIYSHAVFMANTEQVLGRQISQEEQEAIILCIREAIDSHDYEKMVNAIVNRYLDKYKENGDSYGENSFSRRVHEDAIKSEIEEWFSIEKLHLMTTAEYDGLKSDCFYKFVKQVNNKRPKDVEYFKTETISSKIKDALQKKFPEDTIQIDFLYHPSAIEAYPKAGKKLGNPEISSIKNPVFNKAMHQIKRLVNKMIEEGLVDKDTIVNVELAREINSASYRRALAQYQRDHKTIREWAKRKIIECYKEKERDNITPSDTQIAKYILYAEQNGHCLYTGETITPRKFFTDQRFDIEHTIPRSKWNDNSMVNKTLANAEFNRDYKKTKLPANMELTFRNEKISRESIIHNRNTWLKSYRISGNEVQFKESLSDIKEEVRKFKAAARAAANDAIAHEELMVKVHYAKFRLEYLSKKYRTFEREEVPASFNNANLVDTRLITKYARAYLNSYFKKVNVINGQLTDTLRKTWGLQGEYEEKDRSNHIHHCIDAVTVACIEKGTANRLSEAFHCYEQGKVPKVILSPPMLHFDNRMKNLKHEVFIYHRQADRIKPLLDELNKENPKKLNLRGALNKPNPYGCIKKDDALLYVQRSLVKDITDKDISSIIDDMLKERIQDLIRRNGNVKIDKLTKDGVLVLPEYTYTSDKGKVKVIKEVVLRKIRLKAYKQSQYPLKTYRKIDQSVTEYKRNIYVLKEKESNYEARIYGDLVPDNPDGRIKFSRREYFLINTKDIVKNDIMIRPQYPFLFSIHTGDPFIIFDRHPDEIAWTDKKDLNARLFKIKKFDDDKNIILQRNSHSHSNKDVYAKEDELDNKLAFLLKKVPSSFRAVPTNIDILGRIDISYSKNFIDD

SEQ ID NO: 68 - protein, 1541 aa, synthetic construct
MAKILGLDLGTNSIGWAVVEKEDGKFALVDKGVRIFQRGYGDEHQDSSRAAERTLHRGARKLNYRRKGRKIELLRLLGAEYHPFTEEELIAWHKSKKYPVRQELIDWFKLNPYDLRKKAIDGGKLSQKELGRIFYHLTQRRGFKSNKKDSTSVDGESNGNERNLPKDIVLDREYRAKNGDISLSQKLYNDLSEGKKVRNSSEKNNISRITLEDDFKGICKNQNLNNDFIEDVRRTIFDARPLKSQKGNVGRCVFEKGKPRCPISSVEFEEYRMYSFINNIKVKRKDEPKKEFKSLYEQTYFELDIEKDIVPTFFRQKTSFKFQDIRKKFDKHDNADLYEFNYKDNITVSGCPVSAHLKAIFGNEWKTKIFKRNGVNSKGNEIEYNIFDIWHLLFDHYIQDKKDEPLLKIAKEIFELEPEQSKKLLEAPITQGYTNLSFKAIAKIIPFLKKGFRLDQAIIFANIPTVLGLDKDDDLPDDIYEDILDIFNNYGDEKKRNTIVNDCISTFRNESKNAHSNYQIDDIDKQIIEKQAKKKFGEKTWNDLSEVEQISILDELGNNFENQLRQGGVGGQFIKTESIKQKVKDYLVNNLGIATQLTDKVYHPSAIELYEKVEYNDKGLRLLGSPIIDSIKNPLFMRSMCELRKVVNELLKTNIIDNETQIIVELGRDVNDYNMRKAIERYQRERETENEFYKHLLEEFYKEKNIKKTPSVEEGQRVKFWVEQLDDEQDSEAFYTKLEEHTAQYTKKEDRIKLPQYAIEKYRLWREQKGICPYTHNPIGMADLLNGNKYDFEHTVPLSKSFDNSLANKTIAESHFNRYKKGNKAPFELEAEDRKKVAQFIERWEIKVEELEKRIEKQKGKAKNIQDKERKNQNIQERHYLRLHLKYWKTKVNNFKIKEITDGFKNRQFADISIINKYALMYLRSCFDNVSNISSRFIDEYRTIVGYEKSRNYHTHHTIDAVFCACAVDFARRKPDALAKLERYYKINNQYKKATWFDKEGDEAKISSLKEKLEKAKDDLVPWSQFRDDLENLGNSVLVSRRFQDNLKKQTKKKIRSRGKVEHRAANIDGDGNVLEWKYKTDIHGNKIPVKGKMCDENPDFVLHCFKDGKKKRLEVLGDYPEYSEDTIYSQGYLYVRNKNKDVCYEKEARYTWHNDRSDAKTNGLRRRFHEATLYGALKKPELNDEGKFKFDENNNIILQKNKNGEDIVFNNIRKKLEDARKATNSIVDETLRKIITDDNRRSKLLKPKDEERAILFTIPPKKIMKQVLAVIEEISKCNSQEEVVLLDDKKRKLRLQYRSEATKIGRVRCFKSINPISIKENSHKAMKDGSEKESMAHKHYALSVKDMTYAAAIYEFEKIDKATGELKKVERHLEIVTDYEVADFLRGDKVQNSPFPANVKFKDGKQEVLVSNPKIIQSGKYVLFYKDEDEKEDFIKCINHNDISTELANTFSKRLYRIDAIETGPPLRINFCIHNSAMKKKSTDKNEITIQKYMDENKLKDSQLKLDDSVPWYRITKKNWNFLVEGIDFRISPIGKIERI

SEQ ID NO: 69 - protein, 1346 aa, synthetic construct
MSIAEKNNSEYYLGLDIGTDSVGWAVTDLDYNIQKFNGKAMWGIRLFEAGKTAAERRVFRTTRRRIQRRKHRIELLQELFDSEISKADTNFYLRLKESKYWVEDRTLGQTNILFNDPEYTDKDYYKQYPTIYHLRKELMTSDEPHDVRLVYLAIHHLIKNRGHFLFEGEGRKDVSSFKVIFRELCQSMHDEMEIVLEAADLDEVEAVLKNREYGITDKKTRLNKLLTIDDEHKKEQKSIIALLAGGKTKVDALFGEKTSEDSDVKDITFAGDKFEESFDALSIMLGDKMFCLEKMKAIYDWSILEEILQGEDYLSYAKVATYEKHKNDLATLKKIMKKYRSDEYDACFKDPGKKDNYCAYVGMAKKGKKKLVLEKKCSQEDLCKYLGKVFKDVKQNDPDLQYLMAEIQRGTLLPKQVNKDNGVIPHQLHLEELRMILANVKKYLEFLNDKDDSGFTVSEKIEKIFAFRIPYYVGPLNAHHKSLGHCWIVRNKGMENQKVLPWNFDEIVNLEASATAFIRKMTSKCTYVIGADVVPKNSLVYSEFMVLNELNNVKVNGELLPVELKEKVFEEVFKRVKRVTGKRLRDFLIAEGAFKKGDELSGFDQNFKGSLTAYLDFKRILGEKKIPKEAIEEMIQAIVLFGDDRKLLKRRVEKRYGELLSKEEIAAICKLKYTGWGRLSREFLEEIYVVNHKTGEMINIISMMHGTNANLMQLLSSEYRFTEALEAYNEERQTDHSDIAYGIVKDLYVSPAVRRSIWQSLKIVKEIAKIKKAAPKKVFVEVARENAEKKRTVSRKNALIALYKNCKEEERDWIAELDAKTDHELRRDRLYLYYTQMGRCMYTGKPIDLNRLFDTNVYDVDHIFPQSKIKDDSLSNRVLVERKVNAKKSDVYPLPEEIRNKNRGFWTMLHRKELISKRKYDRLTRVTPFSDSELADFIARQLVETRQSTKAVAQVLKKVFPDTDVVYVKAGNVSRFRYDFKMIKVREVNDYHHAKDAYLNIVVGNVYDTKFTKSPLNFIQGKDGKNYSLNQMFNYDVERSGVIAWKAGEKGTITTVKRMMKKNNIQFTRHAFEVKGGLFDQTIMKKGKGQVPIKSSDVHLSDISKYGGYNKAAGAYFFLVEHTVKKKRIRTLEFAPVYLAKKLENRSALLEYCKNELNLLESRILLPKVKINTMFEIDGFKMHISGRTGKQVIFKGAEQLCISEQYGLDIKKINKYIQRCKLARENLPVTAFDGISTHNNDVLYSVMMQKLKDTVYGIHLSSQLKNLEKGKEVFGKLSLKEQCEVLMEALNLFSCNSLSANFKLINSGASCGTLKLSNNFSNRKSFILYNQSITGLFEQKVDLLRL

SEQ ID NO: 70 - protein, 1127 aa, synthetic construct
MNNPKFILGLDIGISSVGWAVIRDDGSNSRIEDFGVRIFESGEKNQGKNRKSQERRKYRSVRRLNRRRKHRRDRLLNYLHSINVLAITDLEEFIRRAGFNTYELRVRGLTHKLTAIELGYVLINLSNHRGYREFYDEDNSKHSEKGIIKTACSNLDEIYNTSQYRTIGEMLYEDKAFKDIENPTNKFPVVRNHRGNYRFLIKREYIEAEVEHVLIAQSKYYPQLTSQSIQDIKNIIFSQRDFEDGPGNPSDQSRRYKGYVDANGECPSIGQCPFYPEHKRGFRNTLVGDIFSLINILSQYSYLDISTGEIGISDVAARALIDNAIEFGFLTVGDMHSILNMHGFTVITKERATKTVKAFQFIPKIKTILEQSGLYWPRWIAEKQFDIETPSGLHRLGEILSKYHTPRRKRNELENSKLVNDSFIALSMSKSFNGTTGVSYRYMIEAIEAFRLGELYGDFQARKVKSFNELNIRTDKQIEVKKLPPITDRDISINPVVFRAINETRKVVNAIIAQYGNMSSINVEVASDLGRSHEQRLEIIKRQKANEKARQQLIAEYQELFPQEKISSDALQRYRLYKLQGGKCMYSGETIDLPRINTKMYEVDHIVPYSLILDNTINNKVLVLSRENQNKGQQVPLQYMRDKKQRDSFEKRIEEMLKNDKVSPKKYKYLCLRDLSDEETLNSWKSRNINDTRHITRYVVGYLQSSLNFQSKVKNNVHGIKALIVSRFRRKWLSNTIWGAEDKDRGNTHLHHSVDAVILANLTPAYVEVASDYLKLSGMIRRNNGKMSAECEDYLARCIRKMQTHYGFKPSYTDGLLRAQAKRGQIPTLIRNLRSEILVRFIDDPSLESDYRKGVMDFYGDNHFAERLRMPIVSYKLEKCYRGPVSADNPISVREIDGELYQINRKSASLVKRQDFSKGKIVSEDADLIKTLDSIFTGKSDKYSLGDYLNDNNLSEFKTLLGRRIHKISVREKLGRQEPGIKKIQPGNQTLLDIDKYYCLELYRDKANKLFVRGLRYFDLVKKNKKLYLNTPYPDNYGEHLMYLYTNEYIHVFNRQEQLKFAGNYRSIKNINSRRFNQHSNRPFQQDVTVFSIAQTDTIKKYDVDIMGRIRGEIKCGEPFSLVPGKK

SEQ ID NO: 71 - protein, 1676 aa, synthetic construct
MAKILGLDLGTNSIGWAVVETLNNKDFGLLKEGVRIFSEGNTAKDRTAKRGIRRLYFRRRLRKIETLRILSECGYCPTISTEELNNWRKHKKYPIENKDLINWLRTDNIGGKGDKQQQIKNPYYYRFKAVKEPISKYNVGRAIYHLAQRRGFLSNSLSQESDELIVLVTNKIKEKIEETENKEEIQKEIKEIFNGLDEEFAKDLKVKKLTKEIHKLKGENFIQDVEKLINKKENLGVVKAGIEQLSKEIQISGHEYLGEYLYFLYQSHSNVINNKQSVEFYNSFVEKFKNENDAKTELTNKIRTRYIGRKVHYLREFEQICKVQNLEKIKTKNGKTLKEELENALFYVRPLKSQRGALGKCKMQKDKSRCPLSHPTYEEFRMWQFINNIRYRNRKIESSQFEHLSYDDKMKIVPLFFRATNFKFNEVIAKIDPSLETYEFSHQKQFEEKPKDSLTVESCPTIARLVSIFRHKGNWEDIKKTTFRYCANDRDGNPKVDSNNKPVESKIDIYEVWQILYRSKLTRNNENYLRQFGKEKLKLTDDKKASDFQNLAKRLKEGYAMLSLNAIKKILDYMLPQNENRPGYIYSHAVFFANMKSIVGKSIWQENKDKIIADIIQKLDLQQKANDKNTFVNSLLRDFFNQPDEDKHFPYDDYTLDNSEKKLIEIKAIEYVGSYTWKESPEGFKKEFLNFAENEYQLFLRNVKINGNKSDYFKSVTRKDKVIKDYIKASYLEKLSIAELRETFNIKNLKLSKEEIVDRQLGRLYHPSEIHLYPKPKVIFDVKGNEKLIMPSPYLPDIKNPVANRTLHKLKGLIEYLVDNNIIDERTNIHIEVAKEINGANMRNAITQFQRDRQQENEKYRRLLEEFEKPVNIDTTEKVVLWKDQLENQTVFYDSLKEFIKLKDSKKLDNTQKKELDVLKRRLWDEQKGICMYSGESISMSQLFQDGVVEIEHTFPRSRIPDNSLENKTIALREENQNKGSKIPYELGPEKHAKIKGRLYFWKNKIDDLRADYQRLEKLVRQDLFSTPEKRDVAIQKKFHKRMELEYWTNKNGTGKYDRFLAKEISKKFKNSQLNDTRIITKYASKYLETYFTKKPFISQGVLVDTFKREWGVLRQDEKKSRAKHIHHTVDAIVIACMTYRFREIILKRYYKRKERGENVSLEVPFKDFANRLRNEIEEEVLVENTFKDKTIKQSLKKVRHRGKIAHKEKYKKDADGNFIKDKRNRKIVTKRYYRLKKGRQLPSNQIEGLKEGEDYFAEVKKNGKTCYYEFVYDKNGQKIQELVPIYSKGNTIRERIHEDSFYGAIKQFDIEDGKLQKGEDGKIKLKQDKDEKDKIFYVIRKPLIYDSSGNKGFKNIDQLKTTNIVDPVVHEMLLLQANEAENFSKSFDDGYYMLKPKRIDNKIEKDENNNIVFERDNEDKYKKGPCIKSVRIFSKLTDPIKLKRQVFESKIQHKYKEMYYVNNKNNYLYVVYENSMKKGELKAVVFSLFDSVKGERESLELESRPYPDSIEVLIGKNRINYELLTRNNRDVVLKKNLHVLFKIDKEETIEDILELSTKETHNRLYRMEGLRKDLVYDEENKCYSRPGTTGQIELRHHMTGNKFNNNSEIEGLQDIYRRYFGNNKKMPDSVTEFKVEYPFPFLLMSLNKMDVFIESIDFELTPLGEIRLVNEPAKP

SEQ ID NO: 72 - protein, 1377 aa, synthetic construct
MEKILGIDLGTNSIGLTLREDNEFKWYGVYTFKKGVGEGKAGEFSYAAERTKHRSTRRLYNARRYRKWETLKVLIENDFCPLRKGNLDKWKHYAKGIGRSFPIDDELFQQWIKLDFNGDDKPDFTSPCQLRRILIVEKLDLSIAQNRYMIGRALFHIAQRRGFKSSRKNGQNEKTAVFKGSTETKTIGRNEYENLIIENGSLGAAFAALEDKNIRIRNRYTLRSDYQYEVKKILNYQNIENKDFCENIEKAIFFQRPLRSQKGLIGKCTLEPNKSRCPVSHPKFEEYRAWSFINNIKFLNKETNLFEPIPLALKQKIYNDKFFYKSKREFPFKEIRKIISINGGKEWELNYSSKMDDVSVPSCFVSARLKSVFGENWENYHKQVTRANKNGIKETKIYTIEDIWHILFEFEDEEYFKEFLSKVLDLNDSQIDELCTLFNSFPVGYANLSLKAIKNILPFLRDGNIYSESVILAKIPEIIGKKIFEDNKNELLSAIKEKVAHIRNKKNNVSIVNNLIFKYYALDYDQRFGWKDFEYKLSDSDLNDVKSTIIEFFGQKTWNTKTEDEKQTIISKVSNLYQDFFASEKREHIAQPHLVNSIKEFLLESFVINEKIVNKIYHPSQIDIYPKKEGQQYLLSPKTAAFKNPMAYKTLYRLKDVINYLIEKEIIDNETRIVVEIARELNDSNKRWAIEKYQRDREAENIEYANAISELLKDPEFSGIADPNSNSDTDKFRLWLEQTENLEDTLKEIQNINKNKSLTVNQKDILKYRLWKEQNCTCLYTGKIINLTDLFDTNKVDFEHTIPRSKSFDNSLANLTVCYADYNRNVKNNKMPSELPNYNEEWNGYSAIKPRLESWEKKVDDLFKQIDFWKFKSKIAMDKSTKDDAIRQKHLRQMQYDYWKNKVERFKQTEITQGFINSQLSDTQIITKYAYHYLKTVFNKVDVIKGSNTADFRKIYGINSKEIEKNRGVHSHHAIDAAVLTLIPSARKREEILKKAYLYAEKNFGKQYLEQPFKGFNYGMIIEIEKNILINNIADKDHTLTPGRKIVRKRGRVVWLDKENKKPKKAQGDSIRGELHLQSYYGKIKIASKDENGRLIRDKNNDIVYNQIDGKDEIWMVIRKPIDNVNFASDIVVDQHLYNFLKKQLESGTKQVDLVDFQGRKLRHLRCRVKAARGFMNPDNATVVKEQVYKSRKDYKNYIYTDSGENYMYGMYENENGRKIIAINKFEASRFSLNQNFDSREEIFKIKEPVMIGSGKKSKEARLIHVFIPGQKVIFFFENKEELKELMPNKISSRLYYIKRFHQAERGSIVFQHHIEARNDEELSKVFGVIGKNGFSVDKLNKNFSPPRILYTPNKDIFIIEGKDFDFSLDGSIKFKY

SEQ ID NO: 73 - protein, 1529 aa, synthetic construct
MAKILGLDLGTNSIGWAVIDATTEDGKVKRYNFIADSGVRIFPEGVEPTTIGQGDKEQSKNASRREHRQMRRQVYRKKLRKVKLLEALIELKMCPLSIEGLYQWSKWNKSKKTEGKLFPTEPKFVAWLKMNPYKLRSKALIEPVELMELGRIFYHFIQRRGFLSSRKGNDDGAIFKGKENMSGIDSTRELMNGKPLGKVLFDISYKEGEKYNQKKNNDGNELRVRARYTQRDMYVEEFHKIWKQQASRLGLEQKTIEIRKSRFLKGSLTARRNRHKLENYIEKYGKEHVLIKGNRVITEEQVPLKQFFAGEITEHDKQLRFKSNESLLFWQRPLRSQKNLLDNCRFENNLPVLMENGEFRRKGKDIVRRSKKPCPLSHPEFELFRSYQFINNIKYGKGQFLTADQRHLVLEILNSKDGNFNFEEIPKALNLTYEKFNYDNDQKIQGNTTIKKLKSLFPEELWIESYEDIWHCFYFFYDTEKLFEKLKKDFQLKTNDIDKISKIKLKDGYSNVSLKAIRNINSFLEKGYSYSDAVILGGIKNAFGQRWENFSDFYLEIEDTVRRILKEDNREGEAMEKIKDYLADPINSFGFSNNAPAFTQLYHHSQEVVEKEKQDFLPELENLRNPIVQQTLHEMRRLVNALLVKYKKEEPGFSFERIHVEMGRDLKNTKTKRRELTQKIRENEKKNDEARKRLEEFGLRPTRDNLLRYLLYDEIQKHISGPVLCPYTGKVISMSDLFSGGNVVQIEHIIPYSVSLDDSFNNKTICEANFNRMKGEKTPYEFFLVNPDYKLWGINKYETTEDAWKEISERAFNLLPYGKAKRFTSKKKFEKSDFIERQLNDTRYISKKAVELLSSVCDNVRMLPGQVTSELRHLWGINNILNPVLGIENFDADVQEYKRIPYYVVTDENNNVLNIHPKTNDRPHVESENLVLAGRVNKGTFSTKYMQLKVDTPNLKDGDYWAVVNISEPHSFQKVFSERPSDDENHIVFKGRIEKQFFNNDTIRKKIKTDETEDGTYWAKFSIVNKELKLAEGKGKLKIAGSKIALFGEVKNGRFTCHIYQCETNMPDGKYWVLLELDFDTIDFIRAVNTKPEINEHQILSYATVDEKGFLTADTDPGYKKKVTISAGRYYCIFDIKTIDEQLYPMENEAPALSKGTRIKEAIVWVDEATGEIKYDPKKNRDDHRHHAIDAITVALTEQGYLQRLSTYHAKEENAKRGIDNTEKFPEPWDGFSNDVKKVAASLLISHKQNNKVLTKISKKIQKNGEVKKSIGFAARGQLHKETVFGKRRSPGHSEHSYHIRKDIRGLKDKKQINKVVDDTIRERIFNHLRENYGIDTSKDNFSVPKDAFYKDGEYSLFLPNNRGGDRVPIKKVRMRENIGNAIQLKNNIKQFVNPRNNHHVLIYEDFDGNLREKVESFIEVVERKRNGDLVYQLPKEDGRKIIATLEINDMFLLGLGKDIEIDTASTDLLSKHLYRVQKVSSSYYTFRHHLASTLDNKNEEIYIQSFGAWEKYNPIKVKIDILGNIKRI

SEQ ID NO: 74 - protein, 1478 aa, synthetic construct
MAKILGLDLGTNSIGWAVVELIDGSFRLIAKGVHIFQRGYGDEHQDVSRASERTRVRSARKLIYRRKGRKIDLLRLLGSEYHPFIDDELTEWHKNRKYPIRTEIQEWFKLNPYELRNNAIEGRKLSRQELGRIFYHYTQRRGFKSNKKDISSYSNDEKGVKKNLPKDVQYHEEYLSEFGETPKSKVLYERHKNAERIRNTSEKNKISRITLQEDFLQICKKQVLLDEFTEDVRKIIFDARPLKSQKGNVGKCVFEKNKPRCPISSVEFEEYRMYSFINNIKIKRKNEDKKEFRSLYEQNDIDNAVELIIPLFYRQKPSFKFEDIHRKLDKAGLYDFNYKDIMTVSGCPLSAHLKSVFGDNWKSIRFDNGKNKNGEDKYIELKDIWHMLFDHYMQDKDDEPLIQIAQTKLELSKEESEKFIKAPVKQGYSNLSYKAIERILFFLKQGYQTDKAIILAKLPDILAKHNKRDCINQIIEEVEKIFEIYSRRKKRNEIVNACISVFRSDFKNAHSNYKLDEFDKEIVVQKIISIYGNTTWSNYSLDEQTAIIRDVENAFENQLRSGNIGGTYKKSMSIKQHVESFLIEEIGIDKNTAAKLYHPSAIDFYPIVEPDVNGKRLLGSPLKDSIKNPLFMRSMCELRKVVNELINTDFYDDRLQCMEPLIDSETLIVIETGRDVNDYNMRKAIDRYQNERETENEFYESILIEFFKETNKNRIPSEDDKRKLKFWVEQHESVEESEDFYNKLESHTYQYTKSADRIKLPKDAIEKYRLWKEQNGICIYTKNQISISDLFDDNKIDFEHTIPLSKSFDNSLENKTISEAYFNRYIKKNKIPYELDKEYINNVSGFIIRWEKKIEEIEERIENLKRKAKNLQDKESKNENIQQRHYLRMHLKYWQKKVNNFKAKEVTDGFRNRQLVDIGIINKYARLYLKSTFDNVFSVNASFVDDYRALIGYKKNRNNHIHHTVDAIFCACSVEFVRRKPHALRTLEKYYYLKDELQKAILFEEQPNEQTKRLKEELEIVHENLEPWKGFAKQLDELKEEILVSHRYRDKLKKQTKKKIRIRGKIVHRAEKIQKLDDNKIKVVEWKYKTDIYGKKIPVKGRLNDENPDFVLHRFRDDSKILIEVLKSFEECKENENTLVLKGYKYVRNKAGEIVYEKEPRYTWHNDREGSLTTGVRDSLHKEMLYGRVKRPAKTENGEFVKDSINGVLMEDWYVKRIPVESLDANDIKNIVDDGIKARIQKHGFKNVKNNGEIILPAEENLKEMTIKRLRCRQKKGRGFLNAIPLKENSHLSAKHESRVERFGKDYKQMSYVDNDGNYQLGIYSDGRNTRYKFLNNLDASELLVSNGKVVKVQDNEFFSVRGKKIFLELKQVLHQNLYAILLQSKESINDVNWDSPNELMRRLYEIKSFSESDGRANIFCLHNQCADNVSKLDLKIGEFKLGIPVVKYIRFRHTNFNALIEGVDFKLTPLGEIKRLK

SEQ ID NO: 75 - protein, 1074 aa, synthetic construct
MSYILGLDLGETSVGWAVLEERGNKPVALKDAGVRVFPKGAEVDEKRGISTSESQTRRQKRSQRRIIRRRSDRKKALKNLLLSHALLPSDNEKQESLLQADPYEIRTRGLDTKLRPDEIGRALVHINQRRGFKSNRKSGDLKEEGILATSIGTLAKAMEESQARSFGEYLYRLDSGYDKGAGKENTRERQGVALRNRGGGYEHLPSRAMIEDEFNLLWSAQAAHHPGLLTKDLKRAVEGIIFYQRSYAISEDRRASWGKKFVNAKMAPQLKHCPLFPEEYRSPAGTWEAQRFRLLKEVNNLEVLDEYGKGRKLDTAERKTLVDALGIEEKQTFVQLSKLIALPKEHRFNLEAGERKHLDGNKFEVQLIKGYYGKKTKKEKEAWLALDGDFKGHLRELVANVEDADQFTETAKELGLTEKQIEGLRTVQPTGNYLAYSYKAIQNLLQFLEDGLDEYHAIQKAREQGVIPPSNEPDEYDLLPLPPDLPNPIVTRALHETRKVVNLLIKTYGKPSRIVVELAREVKHGPKRRQSISRTIEENRKRNEKVKAWYREHGVLTPTRDDVIKYKLWEDQNHLCVYTGKTIDQEDLLSDQNVVDIDHILPRSRSFDDSYRNKVLCVTQANREKGQRLPVEWLGGPGNERFDKMLVRLKNMPSIGHDKFARFNQEKIDTEHAIARQLVDTQYISREAVAYLNQLFPKELRVGEKAVGTVIGKLTSDLRHVWGLNTILSGQEDLKNREDHRHHALDAIVVACATRKHVQELAKRSKWGQDPSEVPPPWKRFRDDVKHMVDSRKRTWKLGDQEITTEGMLVSHRAEKKILGGFHQETNYGPTRDPEWFVRRVGVRSLTGPMIKGIRDDAIRRILTKHCEENGYNPEQDGRTIPPKVFQTLPTMPSGVPIRSVRIVERKQKGIEVFGGKNGIAPRAVLLGNNHHLEMVERDNNGVKEMLVCIVPTLEAARRSRIRKEPIVQRDHGEGMTFKLSLARKEAVVFHKNGKHHLCYITIISGSSTLSKGSGSMDLTFRTHNDARMPKKDTKGKALKITPFARIQSFGAWHELEPIKVAVDPIGRLSKAND

SEQ ID NO: 76 - protein, 1355 aa, synthetic construct
MSKILGLDLGTNSIGWAVVETENNKTFSLKNKGVRIFQEGVKIEKGVEGSKAAERTGYRSARRLKFRRKLRKIEVLKALIKYDLCPPISGDELNIWRYKKIYPTNKEFRNWWLTDNNDNRADRKKQTKNPYYYRSKVATDQLDLTKQEDRYILGRAFYHMAQRRGFLSNRLENTKESDGAVTQNIKQINQQKGDLTLGQYFYQCYCKGEKIRNQYTDRLEHYEQEFNHICKLQGVSDEQKNTLHKAIFYQRPLKSQKGLIGKCPFEPKKSRVAISHPAFEEYRMLCFVNSIKIKLPEDDKLRFLTEKEREKIIPVFYRKSKPHFDFEDIAKQLAPAKQYKFYKAKDKNPEDYLFNFNMKTTVSGCPVSARLKSIFGDEWKELQIKHERKDHSKSIIDIYDVWHVLMTYDSEDKLFEFAKCKLGLGEDKTKEFVQFNLPQGYGSLSLKAINKILPFLQMGLIYSHAVFLANMANVIPPILWNDPENKQLIINEIKELIQSQNEEKQITDIVNGLIKINKDSNAVWSNEAERAFKNDLLQNIKAYYGSTKFDSFSIAQKSSIETNAFELLKTQMQKKNGVGEFAKVKRIDERIKDFLIDNFNDDIKPENLYHPSAIETFKPAQKNNEDKYLLGSPITSSVRNPMAMRALHQLRKLINQLINDDVIDEDTIINIEMARDLMNANERKALQNWQRRREDERKKYAAEIVKHYKASGINAEPSNNDILKYQLWEEQNHICLYTGKNIALHQFLGSNPEFDIEHTIPQSLSFDNSQVNITLCDSKYNRTVKRNKIPYELNNPDILLRIHHWKKEYENIDKDIQKCIKNARGASTKEDKDRHIIRRHQLTTQRNYIREKYQSFTRKDVPSGFKNSQLVDIGLITKYARLYLKTVFDRVNTVKGTTVADFRKLWGLQNAYETKARVNHIHHCIDAITIACMTKPQYDKLAKFYHDWECLKEEGVDKKPVFEKPWPTFTEDVKGIENEILISHYTPDSFAKQSKKLLRKRGIIQKDKNGNPIVLKGDTVRGSLHKETFYGAIERTQANKKGELEKVIKYVVRKKVSDLSDTDVKNIVDDRIREIVGNARNEEKKIQKEIERLKKDLQKAEEHEEPAINDKICVLQTEIEQLYSLPNKKGAPIPIKKVRLLQPSVTNPLCIKKQRDVSTKKPKEYKQNYYAANDGNYLMAIYEGKDAKGKIKRDFEIVNNITAGEFFKQSVQGDLKPQGISTNGGLIPKQKENGKLVLPYKSSIKIGTMIILWEKSPTEVFDLELNEIKRRLYKVVGLSAQKLKISGKSYNYATIVLRHHQEASSSSDLKTYDGAFKRDETYMGQRKLNHNQFNALVENIDFDMNTKGTIKWIKH

SEQ ID NO: 77 - protein, 1302 aa, synthetic construct
MAKVLGLDLGTNSIGWAVVETEDNKNFELCEKGVRIFQEGVKIEKGIEGSKAEERTRYRSARRLKFRRKLRKINTIKALMEADYCPKLSDEELNNWRFSKVYPTNVEFRTWLLTNDSLNKNPYFYRNLGVTRNLDLSQKENRYKIGRAFYHLSQRRGFLSNRLEGTKESDGAIKKEISELTQEKKDKTLGQYFYAKYNNGEKIRDHYTHREDHYLEEFRRICKVQKIDSGFKSDLEKAIFYQRPLKSQKGLIGKCPFEKNKPRCSVSHPLFEEYRMLCFINNIKIKTPDDEKLRFLNPLEKKEIEPLFYRKSKEHFDFEDIAKLLAPKKQYKYYKSREKHSEDYLFNYSMKTTVSGCPVSARFESIFGKNWKDLKIEHTRKNDGKLSFIDIYDVWHVLFTFDNEEKLTEFAQAKLCLQDEKLKEFVHKIHLKHDYASLSLKAIKKVLPYLREGLIYSHAIFLGNMGNAISQEIWSQEENRKIIQQEILEIIKNQNQEKQIIEVVNGLIKKCKDNKWYWSEEAKEKYKKDIEKNIISVFGTSRWNKLEFEIQNDIVNNALNKFKEQIQKQNGKSGFLQIETIDERVKSFLVGNFDAEKEDLEKLYHPSAIEVFKQPLRAEDGRKYLGSPMVSSVRNPMAMRALHQLRKLINELIKQDIIDERTKINIEMSRDLKNANERKALQSWQRDREKLHKEYSSRIQEHFNSEGIKREPSDDDILKYQLWEEQEHKCVYTGSSIGVSDFLGNSPSFDIEHTIPRSLSFDNSQQNKTLCQSRFNRNTKRNKIPSELSNHHEILERIENWKKKYEELDKQIQKQVIRSKTAATKDSKDSAIQRRHKLVEERNYWKGKYEKFAMIDVPSGFKNSQMVDIGIITKYSRLYLKTLFDKVYTVKGNTVADFRVIWGLQKEYEKKARVNHIHHCIDAITIACMSKQNYDNLAKFYHESEERSIAGDNKKPHVAKPWPTFSEDVKGVEKEVLISHYTPDNLHKQSKKKLRNRGKIEKNIQGEIIYQKGDTVRGSLHKETFYGAIKREITNKKGEKEEKVLYVVRKPIDSLSAGDIKNIVDHTVREKVQAAINEKGIKQALNETIWMNQEKQIPIKKVRCYAPTVTKPIHLKNHRDLSKHDYKHSYHVANDGNYLMAIYEGEDDKGKVKRDFEIVNNLKAGEYFKQSVQEVLKAQGINHLEGLVPPSKYIKNVEAPLKQIIKTGTMVLLWEETSDEIWELDNNQKNIRLYKIVKFDKSGRIYFRPHNEARPASELKEVYNLNANKQCEQLRLPVNKFNALVEGYDFKINVLGQIEKLK

SEQ ID NO: 78-80 - skipped (3 entries)

SEQ ID NO: 81 - protein, 1346 aa, synthetic construct
MSIAEKNNSEYYLGLDIGTDSVGWAVTDLDYNIQKFNGKAMWGIRLFEAGKTAAERRVFRTTRRRIQRRKHRIELLQELFDSEISKADTNFYLRLKESKYWVEDRTLGQTNILFNDPEYTDKDYYKQYPTIYHLRKELMTSDEPHDVRLVYLAIHHLIKNRGHFLFEGEGRKDVSSFKVIFRELCQSMHDEMEIVLEAADLDEVEAVLKNREYGITDKKTRLNKLLTIDDEHKKEQKSIIALLAGGKTKVDALFGEKTSEDSDVKDITFAGDKFEESFDALSIMLGDKMFCLEKMKAIYDWSILEEILQGEDYLSYAKVATYEKHKNDLATLKKIMKKYRSDEYDACFKDPGKKDNYCAYVGMAKKGKKKLVLEKKCSQEDLCKYLGKVFKDVKQNDPDLQYLMAEIQRGTLLPKQVNKDNGVIPHQLHLEELRMILANVKKYLEFLNDKDDSGFTVSEKIEKIFAFRIPYYVGPLNAHHKSLGHCWIVRNKGMENQKVLPWNFDEIVNLEASATAFIRKMTSKCTYVIGADVVPKNSLVYSEFMVLNELNNVKVNGELLPVELKEKVFEEVFKRVKRVTGKRLRDFLIAEGAFKKGDELSGFDQNFKGSLTAYLDFKRILGEKKIPKEAIEEMIQAIVLFGDDRKLLKRRVEKRYGELLSKEEIAAICKLKYTGWGRLSREFLEEIYVVNHKTGEMINIISMMHGTNANLMQLLSSEYRFTEALEAYNEERQTDHSDIAYGIVKDLYVSPAVRRSIWQSLKIVKEIAKIKKAAPKKVFVEVARENAEKKRTVSRKNALIALYKNCKEEERDWIAELDAKTDHELRRDRLYLYYTQMGRCMYTGKPIDLNRLFDTNVYDVDHIFPQSKIKDDSLSNRVLVERKVNAKKSDVYPLPEEIRNKNRGFWTMLHRKELISKRKYDRLTRVTPFSDSELADFIARQLVETRQSTKAVAQVLKKVFPDTDVVYVKAGNVSRFRYDFKMIKVREVNDYHHAKDAYLNIVVGNVYDTKFTKSPLNFIQGKDGKNYSLNQMFNYDVERSGVIAWKAGEKGTITTVKRMMKKNNIQFTRHAFEVKGGLFDQTIMKKGKGQVPIKSSDVHLSDISKYGGYNKAAGAYFFLVEHTVKKKRIRTLEFAPVYLAKKLENRSALLEYCKNELNLLESRILLPKVKINTMFEIDGFKMHISGRTGKQVIFKGAEQLCISEQYGLDIKKINKYIQRCKLARENLPVTAFDGISTHNNDVLYSVMMQKLKDTVYGIHLSSQLKNLEKGKEVFGKLSLKEQCEVLMEALNLFSCNSLSANFKLINSGASCGTLQLSNNFSNRKSFILYNQSITGLFEQKVDLLRL

SEQ ID NO: 82 - protein, 1346 aa, synthetic construct
MSIAEKNNSEYYLGLDIGTDSVGWAVTDLDYNIQKFNGKAMWGIRLFEAGKTAAERRVFRTTRRRIQRRKHRIELLQELFDSEISKADTNFYLRLKESKYWVEDRTLGQTNILFNDPEYTDKDYYKQYPTIYHLRKELMTSDEPHDVRLVYLAIHHLIKNRGHFLFEGEGRKDVSSFKVIFRELCQSMHDEMEIVLEAADLDEVEAVLKNREYGITDKKTRLNKLLTIDDEHKKEQKSIIALLAGGKTKVDALFGEKTSEDSDVKDITFAGDKFEESFDALSIMLGDKMFCLEKMKAIYDWSILEEILQGEDYLSYAKVATYEKHKNDLATLKKIMKKYRSDEYDACFKDPGKKDNYCAYVGMAKKGKKKLVLEKKCSQEDLCKYLGKVFKDVKQNDPDLQYLMAEIQRGTLLPKQVNKDNGVIPHQLHLEELRMILANVKKYLEFLNDKDDSGFTVSEKIEKIFAFRIPYYVGPLNAHHKSLGHCWIVRNKGMENQKVLPWNFDEIVNLEASATAFIRKMTSKCTYVIGADVVPKNSLVYSEFMVLNELNNVKVNGELLPVELKEKVFEEVFKRVKRVTGKRLRDFLIAEGAFKKGDELSGFDQNFKGSLTAYLDFKRILGEKKIPKEAIEEMIQAIVLFGDDRKLLKRRVEKRYGELLSKEEIAAICKLKYTGWGRLSREFLEEIYVVNHKTGEMINIISMMHGTNANLMQLLSSEYRFTEALEAYNEERQTDHSDIAYGIVKDLYVSPAVRRSIWQSLKIVKEIAKIKKAAPKKVFVEVARENAEKKRTVSRKNALIALYKNCKEEERDWIAELDAKTDHELRRDRLYLYYTQMGRCMYTGKPIDLNRLFDTNVYDVDHIFPQSKIKDDSLSNRVLVERKVNAKKSDVYPLPEEIRNKNRGFWTMLHRKELISKRKYDRLTRVTPFSDSELADFIARQLVETRQSTKAVAQVLKKVFPDTDVVYVKAGNVSRFRYDFKMIKVREVNDYHHAKDAYLNIVVGNVYDTKFTKSPLNFIQGKDGKNYSLNQMFNYDVERSGVIAWKAGEKGTITTVKRMMKKNNIQFTRHAFEVKGGLFDQTIMKKGKGQVPIKSSDVHLSDISKYGGYNKAAGAYFFLVEHTVKKKRIRTLEFAPVYLAKKLENRSALLEYCKNELNLLESRILLPKVKINTMFEIDGFKMHISGRTGKQVIFKGAEQLCISEQYGLDIKKINKYIQRCKLARENLPVTAFDGISTHNNDVLYSVMMQKLKDTVYGIHLSSQLKNLEKGKEVFGKLSLKEQCEVLMEALNLFSCNSLSANFKLINSGASCGTLNLSNNFSNRKSFILYNQSITGLFEQKVDLLRL

SEQ ID NO: 83 - protein, 1346 aa, synthetic construct
MSIAEKNNSEYYLGLDIGTDSVGWAVTDLDYNIQKFNGKAMWGIRLFEAGKTAAERRVFRTTRRRIQRRKHRIELLQELFDSEISKADTNFYLRLKESKYWVEDRTLGQTNILFNDPEYTDKDYYKQYPTIYHLRKELMTSDEPHDVRLVYLAIHHLIKNRGHFLFEGEGRKDVSSFKVIFRELCQSMHDEMEIVLEAADLDEVEAVLKNREYGITDKKTRLNKLLTIDDEHKKEQKSIIALLAGGKTKVDALFGEKTSEDSDVKDITFAGDKFEESFDALSIMLGDKMFCLEKMKAIYDWSILEEILQGEDYLSYAKVATYEKHKNDLATLKKIMKKYRSDEYDACFKDPGKKDNYCAYVGMAKKGKKKLVLEKKCSQEDLCKYLGKVFKDVKQNDPDLQYLMAEIQRGTLLPKQVNKDNGVIPHQLHLEELRMILANVKKYLEFLNDKDDSGFTVSEKIEKIFAFRIPYYVGPLNAHHKSLGHCWIVRNKGMENQKVLPWNFDEIVNLEASATAFIRKMTSKCTYVIGADVVPKNSLVYSEFMVLNELNNVKVNGELLPVELKEKVFEEVFKRVKRVTGKRLRDFLIAEGAFKKGDELSGFDQNFKGSLTAYLDFKRILGEKKIPKEAIEEMIQAIVLFGDDRKLLKRRVEKRYGELLSKEEIAAICKLKYTGWGRLSREFLEEIYVVNHKTGEMINIISMMHGTNANLMQLLSSEYRFTEALEAYNEERQTDHSDIAYGIVKDLYVSPAVRRSIWQSLKIVKEIAKIKKAAPKKVFVEVARENAEKKRTVSRKNALIALYKNCKEEERDWIAELDAKTDHELRRDRLYLYYTQMGRCMYTGKPIDLNRLFDTNVYDVDHIFPQSKIKDDSLSNRVLVERKVNAKKSDVYPLPEEIRNKNRGFWTMLHRKELISKRKYDRLTRVTPFSDSELADFIARQLVETRQSTKAVAQVLKKVFPDTDVVYVKAGNVSRFRYDFKMIKVREVNDYHHAKDAYLNIVVGNVYDTKFTKSPLNFIQGKDGKNYSLNQMFNYDVERSGVIAWKAGEKGTITTVKRMMKKNNIQFTRHAFEVKGGLFDQTIMKKGKGQVPIKSSDVHLSDISKYGGYNKAAGAYFFLVEHTVKKKRIRTLEFAPVYLAKKLENRSALLEYCKNELNLLESRILLPKVKINTMFEIDGFKMHISGRTGKQVIFKGAEQLCISEQYGLDIKKINKYIQRCKLARENLPVTAFDGISTHNNDVLYSVMMQKLKDTVYGIHLSSQLKNLEKGKEVFGKLSLKEQCEVLMEALNLFSCNSLSANFKLINSGASCGTLTLSNNFSNRKSFILYNQSITGLFEQKVDLLRL

SEQ ID NO: 84 - protein, 1346 aa, synthetic construct
MSIAEKNNSEYYLGLDIGTDSVGWAVTDLDYNIQKFNGKAMWGIRLFEAGKTAAERRVFRTTRRRIQRRKHRIELLQELFDSEISKADTNFYLRLKESKYWVEDRTLGQTNILFNDPEYTDKDYYKQYPTIYHLRKELMTSDEPHDVRLVYLAIHHLIKNRGHFLFEGEGRKDVSSFKVIFRELCQSMHDEMEIVLEAADLDEVEAVLKNREYGITDKKTRLNKLLTIDDEHKKEQKSIIALLAGGKTKVDALFGEKTSEDSDVKDITFAGDKFEESFDALSIMLGDKMFCLEKMKAIYDWSILEEILQGEDYLSYAKVATYEKHKNDLATLKKIMKKYRSDEYDACFKDPGKKDNYCAYVGMAKKGKKKLVLEKKCSQEDLCKYLGKVFKDVKQNDPDLQYLMAEIQRGTLLPKQVNKDNGVIPHQLHLEELRMILANVKKYLEFLNDKDDSGFTVSEKIEKIFAFRIPYYVGPLNAHHKSLGHCWIVRNKGMENQKVLPWNFDEIVNLEASATAFIRKMTSKCTYVIGADVVPKNSLVYSEFMVLNELNNVKVNGELLPVELKEKVFEEVFKRVKRVTGKRLRDFLIAEGAFKKGDELSGFDQNFKGSLTAYLDFKRILGEKKIPKEAIEEMIQAIVLFGDDRKLLKRRVEKRYGELLSKEEIAAICKLKYTGWGRLSREFLEEIYVVNHKTGEMINIISMMHGTNANLMQLLSSEYRFTEALEAYNEERQTDHSDIAYGIVKDLYVSPAVRRSIWQSLKIVKEIAKIKKAAPKKVFVEVARENAEKKRTVSRKNALIALYKNCKEEERDWIAELDAKTDHELRRDRLYLYYTQMGRCMYTGKPIDLNRLFDTNVYDVDHIFPQSKIKDDSLSNRVLVERKVNAKKSDVYPLPEEIRNKNRGFWTMLHRKELISKRKYDRLTRVTPFSDSELADFIARQLVETRQSTKAVAQVLKKVFPDTDVVYVKAGNVSRFRYDFKMIKVREVNDYHHAKDAYLNIVVGNVYDTKFTKSPLNFIQGKDGKNYSLNQMFNYDVERSGVIAWKAGEKGTITTVKRMMKKNNIQFTRHAFEVKGGLFDQTIMKKGKGQVPIKSSDVHLSDISKYGGYNKANGAYFFLVEHTVKKKRIRTLEFAPVYLAKKLENRSALLEYCKNELNLLESRILLPKVKINTMFEIDGFKMHISGRTGKQVIFKGAEQLCISEQYGLDIKKINKYIQRCKLARENLPVTAFDGISTHNNDVLYSVMMQKLKDTVYGIHLSSQLKNLEKGKEVFGKLSLKEQCEVLMEALNLFSCNSLSANFKLINSGASCGTLKLSNNFSNRKSFILYNQSITGLFEQKVDLLRL

SEQ ID NO: 85 - protein, 1346 aa, synthetic construct
MSIAEKNNSEYYLGLDIGTDSVGWAVTDLDYNIQKFNGKAMWGIRLFEAGKTAAERRVFRTTRRRIQRRKHRIELLQELFDSEISKADTNFYLRLKESKYWVEDRTLGQTNILFNDPEYTDKDYYKQYPTIYHLRKELMTSDEPHDVRLVYLAIHHLIKNRGHFLFEGEGRKDVSSFKVIFRELCQSMHDEMEIVLEAADLDEVEAVLKNREYGITDKKTRLNKLLTIDDEHKKEQKSIIALLAGGKTKVDALFGEKTSEDSDVKDITFAGDKFEESFDALSIMLGDKMFCLEKMKAIYDWSILEEILQGEDYLSYAKVATYEKHKNDLATLKKIMKKYRSDEYDACFKDPGKKDNYCAYVGMAKKGKKKLVLEKKCSQEDLCKYLGKVFKDVKQNDPDLQYLMAEIQRGTLLPKQVNKDNGVIPHQLHLEELRMILANVKKYLEFLNDKDDSGFTVSEKIEKIFAFRIPYYVGPLNAHHKSLGHCWIVRNKGMENQKVLPWNFDEIVNLEASATAFIRKMTSKCTYVIGADVVPKNSLVYSEFMVLNELNNVKVNGELLPVELKEKVFEEVFKRVKRVTGKRLRDFLIAEGAFKKGDELSGFDQNFKGSLTAYLDFKRILGEKKIPKEAIEEMIQAIVLFGDDRKLLKRRVEKRYGELLSKEEIAAICKLKYTGWGRLSREFLEEIYVVNHKTGEMINIISMMHGTNANLMQLLSSEYRFTEALEAYNEERQTDHSDIAYGIVKDLYVSPAVRRSIWQSLKIVKEIAKIKKAAPKKVFVEVARENAEKKRTVSRKNALIALYKNCKEEERDWIAELDAKTDHELRRDRLYLYYTQMGRCMYTGKPIDLNRLFDTNVYDVDHIFPQSKIKDDSLSNRVLVERKVNAKKSDVYPLPEEIRNKNRGFWTMLHRKELISKRKYDRLTRVTPFSDSELADFIARQLVETRQSTKAVAQVLKKVFPDTDVVYVKAGNVSRFRYDFKMIKVREVNDYHHAKDAYLNIVVGNVYDTKFTKSPLNFIQGKDGKNYSLNQMFNYDVERSGVIAWKAGEKGTITTVKRMMKKNNIQFTRHAFEVKGGLFDQTIMKKGKGQVPIKSSDVHLSDISKYGGYNKAKGAYFFLVEHTVKKKRIRTLEFAPVYLAKKLENRSALLEYCKNELNLLESRILLPKVKINTMFEIDGFKMHISGRTGKQVIFKGAEQLCISEQYGLDIKKINKYIQRCKLARENLPVTAFDGISTHNNDVLYSVMMQKLKDTVYGIHLSSQLKNLEKGKEVFGKLSLKEQCEVLMEALNLFSCNSLSANFKLINSGASCGTLKLSNNFSNRKSFILYNQSITGLFEQKVDLLRL

SEQ ID NO: 86 - protein, 1346 aa, synthetic construct
MSIAEKNNSEYYLGLDIGTDSVGWAVTDLDYNIQKFNGKAMWGIRLFEAGKTAAERRVFRTTRRRIQRRKHRIELLQELFDSEISKADTNFYLRLKESKYWVEDRTLGQTNILFNDPEYTDKDYYKQYPTIYHLRKELMTSDEPHDVRLVYLAIHHLIKNRGHFLFEGEGRKDVSSFKVIFRELCQSMHDEMEIVLEAADLDEVEAVLKNREYGITDKKTRLNKLLTIDDEHKKEQKSIIALLAGGKTKVDALFGEKTSEDSDVKDITFAGDKFEESFDALSIMLGDKMFCLEKMKAIYDWSILEEILQGEDYLSYAKVATYEKHKNDLATLKKIMKKYRSDEYDACFKDPGKKDNYCAYVGMAKKGKKKLVLEKKCSQEDLCKYLGKVFKDVKQNDPDLQYLMAEIQRGTLLPKQVNKDNGVIPHQLHLEELRMILANVKKYLEFLNDKDDSGFTVSEKIEKIFAFRIPYYVGPLNAHHKSLGHCWIVRNKGMENQKVLPWNFDEIVNLEASATAFIRKMTSKCTYVIGADVVPKNSLVYSEFMVLNELNNVKVNGELLPVELKEKVFEEVFKRVKRVTGKRLRDFLIAEGAFKKGDELSGFDQNFKGSLTAYLDFKRILGEKKIPKEAIEEMIQAIVLFGDDRKLLKRRVEKRYGELLSKEEIAAICKLKYTGWGRLSREFLEEIYVVNHKTGEMINIISMMHGTNANLMQLLSSEYRFTEALEAYNEERQTDHSDIAYGIVKDLYVSPAVRRSIWQSLKIVKEIAKIKKAAPKKVFVEVARENAEKKRTVSRKNALIALYKNCKEEERDWIAELDAKTDHELRRDRLYLYYTQMGRCMYTGKPIDLNRLFDTNVYDVDHIFPQSKIKDDSLSNRVLVERKVNAKKSDVYPLPEEIRNKNRGFWTMLHRKELISKRKYDRLTRVTPFSDSELADFIARQLVETRQSTKAVAQVLKKVFPDTDVVYVKAGNVSRFRYDFKMIKVREVNDYHHAKDAYLNIVVGNVYDTKFTKSPLNFIQGKDGKNYSLNQMFNYDVERSGVIAWKAGEKGTITTVKRMMKKNNIQFTRHAFEVKGGLFDQTIMKKGKGQVPIKSSDVHLSDISKYGGYNKARGAYFFLVEHTVKKKRIRTLEFAPVYLAKKLENRSALLEYCKNELNLLESRILLPKVKINTMFEIDGFKMHISGRTGKQVIFKGAEQLCISEQYGLDIKKINKYIQRCKLARENLPVTAFDGISTHNNDVLYSVMMQKLKDTVYGIHLSSQLKNLEKGKEVFGKLSLKEQCEVLMEALNLFSCNSLSANFKLINSGASCGTLKLSNNFSNRKSFILYNQSITGLFEQKVDLLRL

SEQ ID NO: 87 - protein, 1346 aa, synthetic construct
MSIAEKNNSEYYLGLDIGTDSVGWAVTDLDYNIQKFNGKAMWGIRLFEAGKTAAERRVFRTTRRRIQRRKHRIELLQELFDSEISKADTNFYLRLKESKYWVEDRTLGQTNILFNDPEYTDKDYYKQYPTIYHLRKELMTSDEPHDVRLVYLAIHHLIKNRGHFLFEGEGRKDVSSFKVIFRELCQSMHDEMEIVLEAADLDEVEAVLKNREYGITDKKTRLNKLLTIDDEHKKEQKSIIALLAGGKTKVDALFGEKTSEDSDVKDITFAGDKFEESFDALSIMLGDKMFCLEKMKAIYDWSILEEILQGEDYLSYAKVATYEKHKNDLATLKKIMKKYRSDEYDACFKDPGKKDNYCAYVGMAKKGKKKLVLEKKCSQEDLCKYLGKVFKDVKQNDPDLQYLMAEIQRGTLLPKQVNKDNGVIPHQLHLEELRMILANVKKYLEFLNDKDDSGFTVSEKIEKIFAFRIPYYVGPLNAHHKSLGHCWIVRNKGMENQKVLPWNFDEIVNLEASATAFIRKMTSKCTYVIGADVVPKNSLVYSEFMVLNELNNVKVNGELLPVELKEKVFEEVFKRVKRVTGKRLRDFLIAEGAFKKGDELSGFDQNFKGSLTAYLDFKRILGEKKIPKEAIEEMIQAIVLFGDDRKLLKRRVEKRYGELLSKEEIAAICKLKYTGWGRLSREFLEEIYVVNHKTGEMINIISMMHGTNANLMQLLSSEYRFTEALEAYNEERQTDHSDIAYGIVKDLYVSPAVRRSIWQSLKIVKEIAKIKKAAPKKVFVEVARENAEKKRTVSRKNALIALYKNCKEEERDWIAELDAKTDHELRRDRLYLYYTQMGRCMYTGKPIDLNRLFDTNVYDVDHIFPQSKIKDDSLSNRVLVERKVNAKKSDVYPLPEEIRNKNRGFWTMLHRKELISKRKYDRLTRVTPFSDSELADFIARQLVETRQSTKAVAQVLKKVFPDTDVVYVKAGNVSRFRYDFKMIKVREVNDYHHAKDAYLNIVVGNVYDTKFTKSPLNFIQGKDGKNYSLNQMFNYDVERSGVIAWKAGEKGTITTVKRMMKKNNIQFTRHAFEVKGGLFDQTIMKKGKGQVPIKSSDVHLSDISKYGGYNKAAGAYFFLVEHTVKKKRIRTLEFAPVYLAKKLENRSALLEYCKNELNLLESRILLPKVKINTMFEIDGFKMHISGRTGKNVIFKGAEQLCISEQYGLDIKKINKYIQRCKLARENLPVTAFDGISTHNNDVLYSVMMQKLKDTVYGIHLSSQLKNLEKGKEVFGKLSLKEQCEVLMEALNLFSCNSLSANFKLINSGASCGTLKLSNNFSNRKSFILYNQSITGLFEQKVDLLRL

SEQ ID NO: 88 - protein, 1346 aa, synthetic construct
MSIAEKNNSEYYLGLDIGTDSVGWAVTDLDYNIQKFNGKAMWGIRLFEAGKTAAERRVFRTTRRRIQRRKHRIELLQELFDSEISKADTNFYLRLKESKYWVEDRTLGQTNILFNDPEYTDKDYYKQYPTIYHLRKELMTSDEPHDVRLVYLAIHHLIKNRGHFLFEGEGRKDVSSFKVIFRELCQSMHDEMEIVLEAADLDEVEAVLKNREYGITDKKTRLNKLLTIDDEHKKEQKSIIALLAGGKTKVDALFGEKTSEDSDVKDITFAGDKFEESFDALSIMLGDKMFCLEKMKAIYDWSILEEILQGEDYLSYAKVATYEKHKNDLATLKKIMKKYRSDEYDACFKDPGKKDNYCAYVGMAKKGKKKLVLEKKCSQEDLCKYLGKVFKDVKQNDPDLQYLMAEIQRGTLLPKQVNKDNGVIPHQLHLEELRMILANVKKYLEFLNDKDDSGFTVSEKIEKIFAFRIPYYVGPLNAHHKSLGHCWIVRNKGMENQKVLPWNFDEIVNLEASATAFIRKMTSKCTYVIGADVVPKNSLVYSEFMVLNELNNVKVNGELLPVELKEKVFEEVFKRVKRVTGKRLRDFLIAEGAFKKGDELSGFDQNFKGSLTAYLDFKRILGEKKIPKEAIEEMIQAIVLFGDDRKLLKRRVEKRYGELLSKEEIAAICKLKYTGWGRLSREFLEEIYVVNHKTGEMINIISMMHGTNANLMQLLSSEYRFTEALEAYNEERQTDHSDIAYGIVKDLYVSPAVRRSIWQSLKIVKEIAKIKKAAPKKVFVEVARENAEKKRTVSRKNALIALYKNCKEEERDWIAELDAKTDHELRRDRLYLYYTQMGRCMYTGKPIDLNRLFDTNVYDVDHIFPQSKIKDDSLSNRVLVERKVNAKKSDVYPLPEEIRNKNRGFWTMLHRKELISKRKYDRLTRVTPFSDSELADFIARQLVETRQSTKAVAQVLKKVFPDTDVVYVKAGNVSRFRYDFKMIKVREVNDYHHAKDAYLNIVVGNVYDTKFTKSPLNFIQGKDGKNYSLNQMFNYDVERSGVIAWKAGEKGTITTVKRMMKKNNIQFTRHAFEVKGGLFDQTIMKKGKGQVPIKSSDVHLSDISKYGGYNKAAGAYFFLVEHTVKKKRIRTLEFAPVYLAKKLENRSALLEYCKNELNLLESRILLPKVKINTMFEIDGFKMHISGRTGKKVIFKGAEQLCISEQYGLDIKKINKYIQRCKLARENLPVTAFDGISTHNNDVLYSVMMQKLKDTVYGIHLSSQLKNLEKGKEVFGKLSLKEQCEVLMEALNLFSCNSLSANFKLINSGASCGTLKLSNNFSNRKSFILYNQSITGLFEQKVDLLRL

SEQ ID NO: 89 - protein, 1346 aa, synthetic construct
MSIAEKNNSEYYLGLDIGTDSVGWAVTDLDYNIQKFNGKAMWGIRLFEAGKTAAERRVFRTTRRRIQRRKHRIELLQELFDSEISKADTNFYLRLKESKYWVEDRTLGQTNILFNDPEYTDKDYYKQYPTIYHLRKELMTSDEPHDVRLVYLAIHHLIKNRGHFLFEGEGRKDVSSFKVIFRELCQSMHDEMEIVLEAADLDEVEAVLKNREYGITDKKTRLNKLLTIDDEHKKEQKSIIALLAGGKTKVDALFGEKTSEDSDVKDITFAGDKFEESFDALSIMLGDKMFCLEKMKAIYDWSILEEILQGEDYLSYAKVATYEKHKNDLATLKKIMKKYRSDEYDACFKDPGKKDNYCAYVGMAKKGKKKLVLEKKCSQEDLCKYLGKVFKDVKQNDPDLQYLMAEIQRGTLLPKQVNKDNGVIPHQLHLEELRMILANVKKYLEFLNDKDDSGFTVSEKIEKIFAFRIPYYVGPLNAHHKSLGHCWIVRNKGMENQKVLPWNFDEIVNLEASATAFIRKMTSKCTYVIGADVVPKNSLVYSEFMVLNELNNVKVNGELLPVELKEKVFEEVFKRVKRVTGKRLRDFLIAEGAFKKGDELSGFDQNFKGSLTAYLDFKRILGEKKIPKEAIEEMIQAIVLFGDDRKLLKRRVEKRYGELLSKEEIAAICKLKYTGWGRLSREFLEEIYVVNHKTGEMINIISMMHGTNANLMQLLSSEYRFTEALEAYNEERQTDHSDIAYGIVKDLYVSPAVRRSIWQSLKIVKEIAKIKKAAPKKVFVEVARENAEKKRTVSRKNALIALYKNCKEEERDWIAELDAKTDHELRRDRLYLYYTQMGRCMYTGKPIDLNRLFDTNVYDVDHIFPQSKIKDDSLSNRVLVERKVNAKKSDVYPLPEEIRNKNRGFWTMLHRKELISKRKYDRLTRVTPFSDSELADFIARQLVETRQSTKAVAQVLKKVFPDTDVVYVKAGNVSRFRYDFKMIKVREVNDYHHAKDAYLNIVVGNVYDTKFTKSPLNFIQGKDGKNYSLNQMFNYDVERSGVIAWKAGEKGTITTVKRMMKKNNIQFTRHAFEVKGGLFDQTIMKKGKGQVPIKSSDVHLSDISKYGGYNKAAGAYFFLVEHTVKKKRIRTLEFAPVYLAKKLENRSALLEYCKNELNLLESRILLPKVKINTMFEIDGFKMHISGRTGKVVIFKGAEQLCISEQYGLDIKKINKYIQRCKLARENLPVTAFDGISTHNNDVLYSVMMQKLKDTVYGIHLSSQLKNLEKGKEVFGKLSLKEQCEVLMEALNLFSCNSLSANFKLINSGASCGTLKLSNNFSNRKSFILYNQSITGLFEQKVDLLRL

SEQ ID NO: 90 - protein, 1346 aa, synthetic construct
MSIAEKNNSEYYLGLDIGTDSVGWAVTDLDYNIQKFNGKAMWGIRLFEAGKTAAERRVFRTTRRRIQRRKHRIELLQELFDSEISKADTNFYLRLKESKYWVEDRTLGQTNILFNDPEYTDKDYYKQYPTIYHLRKELMTSDEPHDVRLVYLAIHHLIKNRGHFLFEGEGRKDVSSFKVIFRELCQSMHDEMEIVLEAADLDEVEAVLKNREYGITDKKTRLNKLLTIDDEHKKEQKSIIALLAGGKTKVDALFGEKTSEDSDVKDITFAGDKFEESFDALSIMLGDKMFCLEKMKAIYDWSILEEILQGEDYLSYAKVATYEKHKNDLATLKKIMKKYRSDEYDACFKDPGKKDNYCAYVGMAKKGKKKLVLEKKCSQEDLCKYLGKVFKDVKQNDPDLQYLMAEIQRGTLLPKQVNKDNGVIPHQLHLEELRMILANVKKYLEFLNDKDDSGFTVSEKIEKIFAFRIPYYVGPLNAHHKSLGHCWIVRNKGMENQKVLPWNFDEIVNLEASATAFIRKMTSKCTYVIGADVVPKNSLVYSEFMVLNELNNVKVNGELLPVELKEKVFEEVFKRVKRVTGKRLRDFLIAEGAFKKGDELSGFDQNFKGSLTAYLDFKRILGEKKIPKEAIEEMIQAIVLFGDDRKLLKRRVEKRYGELLSKEEIAAICKLKYTGWGRLSREFLEEIYVVNHKTGEMINIISMMHGTNANLMQLLSSEYRFTEALEAYNEERQTDHSDIAYGIVKDLYVSPAVRRSIWQSLKIVKEIAKIKKAAPKKVFVEVARENAEKKRTVSRKNALIALYKNCKEEERDWIAELDAKTDHELRRDRLYLYYTQMGRCMYTGKPIDLNRLFDTNVYDVDHIFPQSKIKDDSLSNRVLVERKVNAKKSDVYPLPEEIRNKNRGFWTMLHRKELISKRKYDRLTRVTPFSDSELADFIARQLVETRQSTKAVAQVLKKVFPDTDVVYVKAGNVSRFRYDFKMIKVREVNDYHHAKDAYLNIVVGNVYDTKFTKSPLNFIQGKDGKNYSLNQMFNYDVERSGVIAWKAGEKGTITTVKRMMKKNNIQFTRHAFEVKGGLFDQTIMKKGKGQVPIKSSDVHLSDISKYGGYNKAAGAYFFLVEHTVKKKRIRTLEFAPVYLAKKLENRSALLEYCKNELNLLESRILLPKVKINTMFEIDGFKMHISGRTGKQVIFKGAEQLCISEQYGLDIKKINKYIQRCKLARENLPVTAFDGISTHNNDVLYSVMMQKLKDTVYGIHLSSQLKNLEKGKEVFGKLSLKEQCEVLMEALNLFSCNSRSANFKLINSGASCGTLKLSNNFSNRKSFILYNQSITGLFEQKVDLLRL

SEQ ID NO: 91 - protein, 1346 aa, synthetic construct
MSIAEKNNSEYYLGLDIGTDSVGWAVTDLDYNIQKFNGKAMWGIRLFEAGKTAAERRVFRTTRRRIQRRKHRIELLQELFDSEISKADTNFYLRLKESKYWVEDRTLGQTNILFNDPEYTDKDYYKQYPTIYHLRKELMTSDEPHDVRLVYLAIHHLIKNRGHFLFEGEGRKDVSSFKVIFRELCQSMHDEMEIVLEAADLDEVEAVLKNREYGITDKKTRLNKLLTIDDEHKKEQKSIIALLAGGKTKVDALFGEKTSEDSDVKDITFAGDKFEESFDALSIMLGDKMFCLEKMKAIYDWSILEEILQGEDYLSYAKVATYEKHKNDLATLKKIMKKYRSDEYDACFKDPGKKDNYCAYVGMAKKGKKKLVLEKKCSQEDLCKYLGKVFKDVKQNDPDLQYLMAEIQRGTLLPKQVNKDNGVIPHQLHLEELRMILANVKKYLEFLNDKDDSGFTVSEKIEKIFAFRIPYYVGPLNAHHKSLGHCWIVRNKGMENQKVLPWNFDEIVNLEASATAFIRKMTSKCTYVIGADVVPKNSLVYSEFMVLNELNNVKVNGELLPVELKEKVFEEVFKRVKRVTGKRLRDFLIAEGAFKKGDELSGFDQNFKGSLTAYLDFKRILGEKKIPKEAIEEMIQAIVLFGDDRKLLKRRVEKRYGELLSKEEIAAICKLKYTGWGRLSREFLEEIYVVNHKTGEMINIISMMHGTNANLMQLLSSEYRFTEALEAYNEERQTDHSDIAYGIVKDLYVSPAVRRSIWQSLKIVKEIAKIKKAAPKKVFVEVARENAEKKRTVSRKNALIALYKNCKEEERDWIAELDAKTDHELRRDRLYLYYTQMGRCMYTGKPIDLNRLFDTNVYDVDHIFPQSKIKDDSLSNRVLVERKVNAKKSDVYPLPEEIRNKNRGFWTMLHRKELISKRKYDRLTRVTPFSDSELADFIARQLVETRQSTKAVAQVLKKVFPDTDVVYVKAGNVSRFRYDFKMIKVREVNDYHHAKDAYLNIVVGNVYDTKFTKSPLNFIQGKDGKNYSLNQMFNYDVERSGVIAWKAGEKGTITTVKRMMKKNNIQFTRHAFEVKGGLFDQTIMKKGKGQVPIKSSDVHLSDISKYGGYNKARGAYFFLVEHTVKKKRIRTLEFAPVYLAKKLENRSALLEYCKNELNLLESRILLPKVKINTMFEIDGFKMHISGRTGKQVIFKGAEQLCISEQYGLDIKKINKYIQRCKLARENLPVTAFDGISTHNNDVLYSVMMQKLKDTVYGIHLSSQLKNLEKGKEVFGKLSLKEQCEVLMEALNLFSCNSLSANFKLINSGASCGTLQLSNNFSNRKSFILYNQSITGLFEQKVDLLRL

SEQ ID NO: 92 - protein, 1346 aa, synthetic construct
MSIAEKNNSEYYLGLDIGTDSVGWAVTDLDYNIQKFNGKAMWGIRLFEAGKTAAERRVFRTTRRRIQRRKHRIELLQELFDSEISKADTNFYLRLKESKYWVEDRTLGQTNILFNDPEYTDKDYYKQYPTIYHLRKELMTSDEPHDVRLVYLAIHHLIKNRGHFLFEGEGRKDVSSFKVIFRELCQSMHDEMEIVLEAADLDEVEAVLKNREYGITDKKTRLNKLLTIDDEHKKEQKSIIALLAGGKTKVDALFGEKTSEDSDVKDITFAGDKFEESFDALSIMLGDKMFCLEKMKAIYDWSILEEILQGEDYLSYAKVATYEKHKNDLATLKKIMKKYRSDEYDACFKDPGKKDNYCAYVGMAKKGKKKLVLEKKCSQEDLCKYLGKVFKDVKQNDPDLQYLMAEIQRGTLLPKQVNKDNGVIPHQLHLEELRMILANVKKYLEFLNDKDDSGFTVSEKIEKIFAFRIPYYVGPLNAHHKSLGHCWIVRNKGMENQKVLPWNFDEIVNLEASATAFIRKMTSKCTYVIGADVVPKNSLVYSEFMVLNELNNVKVNGELLPVELKEKVFEEVFKRVKRVTGKRLRDFLIAEGAFKKGDELSGFDQNFKGSLTAYLDFKRILGEKKIPKEAIEEMIQAIVLFGDDRKLLKRRVEKRYGELLSKEEIAAICKLKYTGWGRLSREFLEEIYVVNHKTGEMINIISMMHGTNANLMQLLSSEYRFTEALEAYNEERQTDHSDIAYGIVKDLYVSPAVRRSIWQSLKIVKEIAKIKKAAPKKVFVEVARENAEKKRTVSRKNALIALYKNCKEEERDWIAELDAKTDHELRRDRLYLYYTQMGRCMYTGKPIDLNRLFDTNVYDVDHIFPQSKIKDDSLSNRVLVERKVNAKKSDVYPLPEEIRNKNRGFWTMLHRKELISKRKYDRLTRVTPFSDSELADFIARQLVETRQSTKAVAQVLKKVFPDTDVVYVKAGNVSRFRYDFKMIKVREVNDYHHAKDAYLNIVVGNVYDTKFTKSPLNFIQGKDGKNYSLNQMFNYDVERSGVIAWKAGEKGTITTVKRMMKKNNIQFTRHAFEVKGGLFDQTIMKKGKGQVPIKSSDVHLSDISKYGGYNKAAGAYFFLVEHTVKKKRIRTLEFAPVYLAKKLENRSALLEYCKNELNLLESRILLPKVKINTMFEIDGFKMHISGRTGKQVIFKGAEQLCISEQYGLDIKKINKYIQRCKLARENLPVTAFDGISTHNNDVLYSVMMQKLKDTVYGIHLSSQLKNLEKGKEVFGKLSLKEQCEVLMEALNLFSCNSRSANFKLINSGASCGTLQLSNNFSNRKSFILYNQSITGLFEQKVDLLRL

SEQ ID NO: 93 - protein, 1346 aa, synthetic construct
MSIAEKNNSEYYLGLDIGTDSVGWAVTDLDYNIQKFNGKAMWGIRLFEAGKTAAERRVFRTTRRRIQRRKHRIELLQELFDSEISKADTNFYLRLKESKYWVEDRTLGQTNILFNDPEYTDKDYYKQYPTIYHLRKELMTSDEPHDVRLVYLAIHHLIKNRGHFLFEGEGRKDVSSFKVIFRELCQSMHDEMEIVLEAADLDEVEAVLKNREYGITDKKTRLNKLLTIDDEHKKEQKSIIALLAGGKTKVDALFGEKTSEDSDVKDITFAGDKFEESFDALSIMLGDKMFCLEKMKAIYDWSILEEILQGEDYLSYAKVATYEKHKNDLATLKKIMKKYRSDEYDACFKDPGKKDNYCAYVGMAKKGKKKLVLEKKCSQEDLCKYLGKVFKDVKQNDPDLQYLMAEIQRGTLLPKQVNKDNGVIPHQLHLEELRMILANVKKYLEFLNDKDDSGFTVSEKIEKIFAFRIPYYVGPLNAHHKSLGHCWIVRNKGMENQKVLPWNFDEIVNLEASATAFIRKMTSKCTYVIGADVVPKNSLVYSEFMVLNELNNVKVNGELLPVELKEKVFEEVFKRVKRVTGKRLRDFLIAEGAFKKGDELSGFDQNFKGSLTAYLDFKRILGEKKIPKEAIEEMIQAIVLFGDDRKLLKRRVEKRYGELLSKEEIAAICKLKYTGWGRLSREFLEEIYVVNHKTGEMINIISMMHGTNANLMQLLSSEYRFTEALEAYNEERQTDHSDIAYGIVKDLYVSPAVRRSIWQSLKIVKEIAKIKKAAPKKVFVEVARENAEKKRTVSRKNALIALYKNCKEEERDWIAELDAKTDHELRRDRLYLYYTQMGRCMYTGKPIDLNRLFDTNVYDVDHIFPQSKIKDDSLSNRVLVERKVNAKKSDVYPLPEEIRNKNRGFWTMLHRKELISKRKYDRLTRVTPFSDSELADFIARQLVETRQSTKAVAQVLKKVFPDTDVVYVKAGNVSRFRYDFKMIKVREVNDYHHAKDAYLNIVVGNVYDTKFTKSPLNFIQGKDGKNYSLNQMFNYDVERSGVIAWKAGEKGTITTVKRMMKKNNIQFTRHAFEVKGGLFDQTIMKKGKGQVPIKSSDVHLSDISKYGGYNKARGAYFFLVEHTVKKKRIRTLEFAPVYLAKKLENRSALLEYCKNELNLLESRILLPKVKINTMFEIDGFKMHISGRTGKQVIFKGAEQLCISEQYGLDIKKINKYIQRCKLARENLPVTAFDGISTHNNDVLYSVMMQKLKDTVYGIHLSSQLKNLEKGKEVFGKLSLKEQCEVLMEALNLFSCNSLSANFKLINSGASCGTLTLSNNFSNRKSFILYNQSITGLFEQKVDLLRL

SEQ ID NO: 94 - protein, 1346 aa, synthetic construct
MSIAEKNNSEYYLGLDIGTDSVGWAVTDLDYNIQKFNGKAMWGIRLFEAGKTAAERRVFRTTRRRIQRRKHRIELLQELFDSEISKADTNFYLRLKESKYWVEDRTLGQTNILFNDPEYTDKDYYKQYPTIYHLRKELMTSDEPHDVRLVYLAIHHLIKNRGHFLFEGEGRKDVSSFKVIFRELCQSMHDEMEIVLEAADLDEVEAVLKNREYGITDKKTRLNKLLTIDDEHKKEQKSIIALLAGGKTKVDALFGEKTSEDSDVKDITFAGDKFEESFDALSIMLGDKMFCLEKMKAIYDWSILEEILQGEDYLSYAKVATYEKHKNDLATLKKIMKKYRSDEYDACFKDPGKKDNYCAYVGMAKKGKKKLVLEKKCSQEDLCKYLGKVFKDVKQNDPDLQYLMAEIQRGTLLPKQVNKDNGVIPHQLHLEELRMILANVKKYLEFLNDKDDSGFTVSEKIEKIFAFRIPYYVGPLNAHHKSLGHCWIVRNKGMENQKVLPWNFDEIVNLEASATAFIRKMTSKCTYVIGADVVPKNSLVYSEFMVLNELNNVKVNGELLPVELKEKVFEEVFKRVKRVTGKRLRDFLIAEGAFKKGDELSGFDQNFKGSLTAYLDFKRILGEKKIPKEAIEEMIQAIVLFGDDRKLLKRRVEKRYGELLSKEEIAAICKLKYTGWGRLSREFLEEIYVVNHKTGEMINIISMMHGTNANLMQLLSSEYRFTEALEAYNEERQTDHSDIAYGIVKDLYVSPAVRRSIWQSLKIVKEIAKIKKAAPKKVFVEVARENAEKKRTVSRKNALIALYKNCKEEERDWIAELDAKTDHELRRDRLYLYYTQMGRCMYTGKPIDLNRLFDTNVYDVDHIFPQSKIKDDSLSNRVLVERKVNAKKSDVYPLPEEIRNKNRGFWTMLHRKELISKRKYDRLTRVTPFSDSELADFIARQLVETRQSTKAVAQVLKKVFPDTDVVYVKAGNVSRFRYDFKMIKVREVNDYHHAKDAYLNIVVGNVYDTKFTKSPLNFIQGKDGKNYSLNQMFNYDVERSGVIAWKAGEKGTITTVKRMMKKNNIQFTRHAFEVKGGLFDQTIMKKGKGQVPIKSSDVHLSDISKYGGYNKARGAYFFLVEHTVKKKRIRTLEFAPVYLAKKLENRSALLEYCKNELNLLESRILLPKVKINTMFEIDGFKMHISGRTGKQVIFKGAEQLCISEQYGLDIKKINKYIQRCKLARENLPVTAFDGISTHNNDVLYSVMMQKLKDTVYGIHLSSQLKNLEKGKEVFGKLSLKEQCEVLMEALNLFSCNSRSANFKLINSGASCGTLQLSNNFSNRKSFILYNQSITGLFEQKVDLLRL

SEQ ID NO: 95 - protein, 1346 aa, synthetic construct
MSIAEKNNSEYYLGLDIGTDSVGWAVTDLDYNIQKFNGKAMWGIRLFEAGKTAAERRVFRTTRRRIQRRKHRIELLQELFDSEISKADTNFYLRLKESKYWVEDRTLGQTNILFNDPEYTDKDYYKQYPTIYHLRKELMTSDEPHDVRLVYLAIHHLIKNRGHFLFEGEGRKDVSSFKVIFRELCQSMHDEMEIVLEAADLDEVEAVLKNREYGITDKKTRLNKLLTIDDEHKKEQKSIIALLAGGKTKVDALFGEKTSEDSDVKDITFAGDKFEESFDALSIMLGDKMFCLEKMKAIYDWSILEEILQGEDYLSYAKVATYEKHKNDLATLKKIMKKYRSDEYDACFKDPGKKDNYCAYVGMAKKGKKKLVLEKKCSQEDLCKYLGKVFKDVKQNDPDLQYLMAEIQRGTLLPKQVNKDNGVIPHQLHLEELRMILANVKKYLEFLNDKDDSGFTVSEKIEKIFAFRIPYYVGPLNAHHKSLGHCWIVRNKGMENQKVLPWNFDEIVNLEASATAFIRKMTSKCTYVIGADVVPKNSLVYSEFMVLNELNNVKVNGELLPVELKEKVFEEVFKRVKRVTGKRLRDFLIAEGAFKKGDELSGFDQNFKGSLTAYLDFKRILGEKKIPKEAIEEMIQAIVLFGDDRKLLKRRVEKRYGELLSKEEIAAICKLKYTGWGRLSREFLEEIYVVNHKTGEMINIISMMHGTNANLMQLLSSEYRFTEALEAYNEERQTDHSDIAYGIVKDLYVSPAVRRSIWQSLKIVKEIAKIKKAAPKKVFVEVARENAEKKRTVSRKNALIALYKNCKEEERDWIAELDAKTDHELRRDRLYLYYTQMGRCMYTGKPIDLNRLFDTNVYDVDHIFPQSKIKDDSLSNRVLVERKVNAKKSDVYPLPEEIRNKNRGFWTMLHRKELISKRKYDRLTRVTPFSDSELADFIARQLVETRQSTKAVAQVLKKVFPDTDVVYVKAGNVSRFRYDFKMIKVREVNDYHHAKDAYLNIVVGNVYDTKFTKSPLNFIQGKDGKNYSLNQMFNYDVERSGVIAWKAGEKGTITTVKRMMKKNNIQFTRHAFEVKGGLFDQTIMKKGKGQVPIKSSDVHLSDISKYGGYNKARGAYFFLVEHTVKKKRIRTLEFAPVYLAKKLENRSALLEYCKNELNLLESRILLPKVKINTMFEIDGFKMHISGRTGKQVIFKGAEQLCISEQYGLDIKKINKYIQRCKLARENLPVTAFDGISTHNNDVLYSVMMQKLKDTVYGIHLSSQLKNLEKGKEVFGKLSLKEQCEVLMEALNLFSCNSRSANFKLINSGASCGTLTLSNNFSNRKSFILYNQSITGLFEQKVDLLRL

SEQ ID NO: 96-100 - skipped (5 entries)

SEQ ID NO: 101 - DNA, 4317 bp, synthetic construct
  source 1..4317: mol_type = other DNA
atgaagcggatcctgggcctggacctgggcaccacctccatcgggtgggccctggtgaacgaggccgagcacgagtccgagcagtccagcatcatcaagctgggcgtgcgggtgaaccccctgaccgtggacgagtcctccaacttcgagaaggggaaggccgtggagactaaccaggtgcgccgcctgaagcggggcgcccaccgcaacctgctgcggtacaagcagcggcgggcgaccctgctgtccatcctgcggaagaacgggttcatcacggaccagaccctgctgtccgagaacggggccaactccacctacgagacttacaacctgcgggccaaggccgtggtggacaagatctccctggaggagttcgcccgggtgctgctgatgatcaacaagaagcggggctacaagagctcccgcaaggccaagtccggcgaggacggcaagctgatcgacggcatgaccatcgccaagcgcctgtacgacgagaacatcacccccgggcagctgtgcttccagatcctgtccgaggggaagaaggtgctgcccgacttctaccgcagcgacctgcagcaggagttcgaccgcatctgggactaccaggcccagttctaccccgaggtgctgaccttcgagctgaaggagcgcctcgtggggaagaacgcctcccagacctgggacaccctggcccagtacttcgtgtggaccgagcagcgcaaggtctggaacgagacactggcccagaacgaggtgaaggacgtggtgttccagctgaccaagcccaaccgcaaggtgaagggcgtggagctgaagaaggagaactacgagtggcgccacaaggccctgtccgagaagatgcaccccgagaacctggccatcgtgttccaggagatcaacgccgacatcaacaagtccagcggctacctgggcgccatctccgaccggtccaagaacctgttcttcaacaacatcaccgtggggcagtacctgatgtcccgcctgaacgagaaccggcacaacagcctgaagaacctggtgttctaccggcaggactacatggacgagttcgagacaatctgggagtcccaggcccgcttccactcccagctgacccccgagctgaaggccgagatccgggacgtggtgatcttctaccagcggcggctgaagtcccagaagtccctgatctccatgtgcgagttcgagcggcaggagaaggaggtggtctgcaacggcaagaccaagaccatcgtggtgggcagccgggtggtgcccaggtccagcctgctgttccaggacttcaagatctggcagaccctgaacaacgtggaggtgatcgtggtggacgacttcggcaagaagaagcgggccaagaagaacatcatcagcccctccaacgccacggaggccaccgagactctggagctggaggggcggcgccgcctgacccaggaggagaaggagatgctggccgaggagctgtccatcaaggccgagctgaagaagtcccaggtgctgaacctgctgttcggcaagaccgagagcctggacctgaacttcgagtgcctgaagggcaacaccaccgggcactccctgtaccaggccttctccaagatgatggacctcagcggccacgagcccctggacttcaagaagtccaccagcgacctgaagtcccagacctacgccgtgttcaagaccctggggtggaactgcaacatcctggacacccagatctacctggacaaggccctggacgagcagaccagctacaagctgtggcacctgctgtacagcttcgagggggacaactccgccaccggggactccaagctgaaggagaagctgaccaccctgtgcaactgccccgccgactacgtggggcccctgatggacatcgtgttcgaggacgactacgggtccctgtccgccaaggccatccgcaagatcctgccctacatgaaggagggctgcggctacgacgtggcctgcacctacgccgggtaccggcacagcgcctcctccctgaccaaggaggagatcgagcagaaggagctgctcgaccagctggagctgctgcccaagaacgccctccggaaccccgtggtggagaagatcctgaaccagatggtgaacgtggtgaacgagatcatcaacacctacgggcggcccgacgagatccgcgtggagctggcccgcgagctgaagaagaaccagaaggagcgggagcagatgaccaaggccatcagcgtggccaccaagcagcaggagcagatccgcgagctgctgcagaaggagttcgggatcagcaaccccagccgcaacgacatcatccgctaccggctctacgaggagctgaaggccaacgggtacaagaccctgtactccgacatctacatcccccgggagaagctgttctccaaggagatcgacatcgagcacatcatccccaaggcccggctgttcgatgacagcttctccaacaagaccctggagtacaggtccgtgaacatcaacaagggcagccagaccgcctacgacttcgtgcgggagacatacggcgaggagggcctgaagcggtacctgtccgcctgcacctccctgttcgcccagcagaaaaccaagctgaagaagctgaagatgaccgaggcggagatccccgccgacttcatcgacagggacctgcggaacacccagtacatcgccaagcgggccctgtccatgctgcacaccatctgccggagcgtggtggccacctccggcagcatcaccgagcagctgcggaaggactgggagctgatcgacgtgatgaaggagctgaactgggacaagtacgccgccatcggcaaggtgtcctaccaccaggaccgcgacggccggcagatcggccggatcaccgactggaccaagcggaacgaccaccggcaccacgccatggacgccctgaccgtggcgttcaccaagccggccttcgtgcagtacttcaacaacaagaacgccgcccaccaggagggcagcgagctgtacgccatccggaacagctacttccagaacgggcgggccaaggcccccatcccgctgcacgccttccgcgccgaggccctgcggcacctggagcagatcctggtgtccatcaaggccaagaacaaggtggtgaccctgaacgtgaacaaggtgcacaagcccaagggcggcacctacaccaaggtgcagctgacccccagggggcagctgcacaacgagacaatctacggcagccggcgggagtacgccaccaaggaggaaaccgtgggctccgccttcgacatggagaagatcgccaccgtgtgcaaggccatctaccgggaggccctgctctggcgcctgaacgagttcgggggcgaccccaagaaggccttcacgggcaagaacgccctggacaagaacccgatctggctgaacgaggcccacaccaaggccgtgcccagcaaggtcaagaccgtgtccttcgacaccacctacaccatccggaaggacatctcccccgacctgaacgtggccaaggtggtggacgccaagatccgcaagctcctggaggcccggctggaggccttcgggggcgaccccaagaaggccttcaccaacctcgaggagaaccccatctggctgaaccaggcccagggcatctgcatcaagcgggtgaccatctacggggtgtccaacgcccagtccctgcacgacaagcgggacaaggaggggcgcctcgtgctggacgagcaggggaaaaccatccccgtggacttcgtgaacaccagcaacaaccaccacgtggccatctaccagaagcccgtgctggacaagaaggggaaccccatcctggacgagaatggggagccccggatggagctggacgagcgggtggtgtccttctacgaggccgtggcccgggtgaaccaggggctgcccgccgtggaccgcgagtacaagcgggacgaggggtggaagttcctgtacacgatgaagcagaacgagtacttcgtgttccccaacgaaaccaccgggttcgacccccgggaggtggacctcctggaccccaacaactacgccctgatcagccccaacctgttcagggtgcagacgatgagcaaggtgatgtacgggaactccaccgtgcgggactacaagttccggcaccacctggagacaaccgtgtgcgacatgaaggagctgcgggacctgacctacaagcagtacaagtccctgcagttcctgcgcaacatcatcaaggtgcggatcaaccacatcggggagatcgtgagcgtgggcgagtac

SEQ ID NO: 102 - DNA, 3666 bp, synthetic construct
  source 1..3666: mol_type = other DNA
atgaagaaggtgctgggcctggacctgggcgtggggtccatcggctggtgcctgatcgagaaggacgagaacaacatccccgtgcgcatcctgcgcatggggagccggatcgtccccatcgactccgacgaggagtccgggttcaccaagggcaacggcaagtccaagaactccgaccgcaccgccaagcggaccgcccggaagtgctacgaccggtaccagctgcggcgccacgccctgatcaacaccctgaagcgcctgggcatcgagcccaacaacatccccgagcagacgcccctggagctgtggcagaagcgggccgacgccgcctccaaggagatctccctggaggagctcggccgggtgctgctgcacatcaaccagaagcgggggtacaagcactcccgcctgtccaacagcaaccgggaggagacagtgtacgtgcaggaggtgaactcccggtacgacaacctgaaggccgagggcctgaccatcggccagcacttcgccctgaagctgaaggagaacgagcagacctccgaggacgggaagaagtactacacctaccgcatcaaggagcaggtgtacccccgccacgcctacgaggaggagacaaagaagatcctcgaggtgcagaagtccttccacagcgacatcctgaccaccgacgtgtgcaaggagatcctgaacatcatcttctaccagcgggacctgaagtcctgcaaggacctggtgagcttctgcgagttcgagagctacaccatcaagaaggacgggaaggagatcaccatcgggcccaaggtggcccccaagaccagccccctggcccagctgtgctccatcctggagacagccaacaacatcaccatccgcaaccggcggaacgacgagctgtacatcctgccggagcagcggaaggccctggccgacttcctggacaacaacgaggtgctgaagctgaccaacctgtacagcatcctcaacatcaacaagaaggacggctggtgggccgggaaggccatcggcaaggggctgaaggggaacaccaccaagtgcgagatccgcaaggccctgtgcaacctgcccaccgaccagatcgaggccctgaccaagttcgagctgaagatcgacgagtacgtggacaaggagacaggggaggtgcggaagcgcatcgacaacacctacgccgagcggcagcccctgtaccggctgtggcacctgatctacagcatcaaggacgccgacgagctgtccgacgccctgcaccacctgggcatcgaggacaaggagacaatccagaagctgtgcaacctggacttccggaccgccggctacgccaacaagagcgccaaggccatcggccggatcctgccctacctgatggagggcatgatgtacagccaggcctgcgagcgggccgggctggaccacagccagcgcatcgaccccgagcgcaccctgctgtccagcctgccgcagatcaagaagaacgagctgcggcagcccgtggtggagaagatcctgcagcagctggtgaacatcgtgaacctgctgctgaaggaggaggggcagatcgacgagatccgggtggagctcgcccgggagctgaagcagtccaaggacgagcgcaacgaaaccttccgccggaacaaccagaacgagcggaagaacaaggagtacgccgagcgcatcaaggagtacgggctgacccccacccggaaccgcatcatgaagatgaagatgtgggtggagtccgagcactcctgcatgtactgcgggcagcccgtggacgtgaaggagttcctgcagggcgccgacgtggagcgggagcacatcatccccaaggggctgctgttcgacaactccttcaccaaccaggtgtgcgcctgccggtcctgcaacagcaagaagggcatgcgcaccgcctacgacttcatcgagtccgagcgcggcgaggaggggctgcgcagcttcatcgagcacatcaactacctgttcgacaagaagcagatcagccgctccaagctgaaccggctcctggtgagctacaaggcctaccaggagcggaaggcccaggggaaggagacagaggaggacaagaacctctgggagaacttcatcgaccgccagctgcggcagtcccagtacatcgcccggaaggccgtggagatcctgcagctggtgtgtcggaacgtgtactccaccagcgggatgatcaccgacctggtgcggcagcagtgggggtacaacgacatcctgcacgacctgaacttcgagcgctacaagaaggccgggctgaccacgatggtcaccaagctgcacagcggcaaggaggtggaggtggagcggatcaaggactggaccaagcgcctggacaaccggcaccacgccgtggacgccctggccatcgcctgcaccacccagtccctgatccagcgcctgaacaccctgaacgcctcccgggacgagatgctgatcgacctgatcaacaaggacgagcgcatcatcgaccccgagcgctccatgctcgagaagtggatctgcgcccagccccacatcacctacgcccaggccaaggaggagatcgacaagatcatcatctcccagcgccccaacacccggatcaccgtgcccgggaagcgctacatctacaagaacgggaagcgcaccctggcccagcggggcatcatcgtgccccgcggggccctgcacgccgagttcgtgtacgggcgcatcctgaagcaggagaacacccaggagggcatcaagctgagcccccagtacgtgcgcaagtacaagctggggatcggcgcccagggcttcctgttcaacgggaaggagttctacaaggaggagctgaagaaggaccccaagaccgggatcgtgaccatcgtggtgatcgacaagatcaaggacgtgctggacaagatcgtggacggcggcatccgccgccggatcctggagcgcctgaaccgggggttcgaggagggcaaggactaccgcaccaacgtgccccaggccctggccaacctgaagaacctggacgaggagcccatctacagcgacgacgccaagacccggcccatcctgtccgtgcggaagtacgtgcccagcaccacgatggtggccgtgcgccgggacgggaacggccggcccctggcgtacgccgagcccgacggcaaccaccacgtggccttctaccgcaacgaggacggcctgatcaccgagcagatcgtgaccaagtggcaggccgtgcagcggaagctgcacgacatccccatcatcatcgacaaccccacccagctgtggaacgacatcctggagcggaacgacatccccgacgagctgctccagaccctgcccaacgacaagagctccctgatgctgtccctgcagatcggggaggctctggtgatggggatggacgaaaccgacttcaagaaggccatcgaggagaaggacatgcggaccctggccgaccacctgtacttcgtgcagaacctgtccagcagcaactaccggctgcggcggcacgtggagtcctcctacgacatcaccgggatgaacaaggaggaccagcggttcctgaacatcaagtccatcggcgccctgatcaactacaacccccacaaggtgaagatcaccgtgctgggggacatcatcccc

SEQ ID NO: 103 - DNA, 3648 bp, synthetic construct
  source 1..3648: mol_type = other DNA
atgaagaagcgcatcctgggcctggacaccggcaccaacagcctggggtgggccgtggtggaccgggaggagaacggccagtacaccctggtggacaagggcgtggtgatcttccaggagggcgtgaagatcgagaagggcatcgagtcctcccgggccgccgagcggaccggccaccgggccctgcgccggcagtacttccggcgcaggctgcgcaagatcaaggtgctcaagaccctggtcaagtacaacctgtgccccgccctgaccgaggacgacctggagctgtggaagctccggaagatctaccccaagaaggacgagttcatggcctggcagcggaccaacgacaacgaggacatcaacccctaccactgccggtacatctgcctgaacgaggtgctggacctggaccggcagcaggaccgctacaccctggggcgggccttctaccacatggcccagcgccggggcttcctgtccaaccggctggaccagaccgacgagaaggagacagggaaggtgaaggccgacatcaagaccctgtccaaggagatcgaggacagcgggtgcaagtacctgggcgagtacttctacatcctgtacaaggagaagggcaacaccgtgcgcatccggacccggtacaccgaccgggagcagcactacaagaaggagttcttcgccatctgcgagaagcagaagctgcccaaggagatggtggaggaggtggcccgggccctgttcttccagcggcccctgaagtcccagcgccagagcgtggggaagtgcaccttcgagaagggcaagcccaggtgcagcgacagccaccccctgtacgaggagtacaggatgctgtccttcctgaactccatccggatccagggcccctgggacgtgaacggctaccggcccctgaacgacgaggagctgaagcggatcgagtccctgttctaccgcaagagcaagcccaacttcgacttcgaggagatcgccaagaagatcgccgggaagaaccagtaccagtggaaggacgacaccaaggtgaacatgccctacaagttcaacttccgcatgtcccagggcgtgcccggctgccccaccatcgcccagctgaaggaggtgttcggcgaggagtggaaggagggcatcgccgagacatacaccctgagcaccaagaaggacggcacccagaagtccatcgacgagctggtgaacgacatctggaacgtgctgttctccttcgactccaaggacaaggtgaaggagttcggggtgaagcacctgcagctggacgaggagcaggccaagaagttcagcgagatccggctgtcccgggggtacgcctccctgtccctgaaggccatccggaacatcctgcccttcctgcagatggggatgatctacagcgacgccgtgttcttcgccaagatccccacgatcatcggccagagcctgtgggccgagcggcagaacgtgatcaaggaggatctggcctacgccatccagatggccatgaaggagaagcggcggatcgacgaggccgtcaaggactacctgctggacaacttcgacctgaagcccggggccaccgagctgctgtaccaccccagcatgatcgaaacctaccccgacgccaagcccaacaaggacggcatcgtcctgctgggcagcccccggaccaacgccgtgaagaaccccatggccatgcgcagcctgcacgaggtgcgcaaggtggtgaacagcctgatcaaggagggcaagatcgggcccgacaccgaggtgcacatcgagtacgcccgggagctgaacaacgccaacatgcgcaccgccatcaacgactggcagaaggagcaggagcgcaaccacaaccagtacgccgaggagatctccaagctgtacaaggaggccaccgggaaggacatccagcccaccgacctggacatcctgaagtaccagctgtgggaggagcaggggcacatctgcctgtacaccggcaagaagatcggcatcgccgacttcatcggcgccgggcccatgttcgacatcgagcacaccatcccccagagcgtgggcggcgactccacccaggagaacatgaccctgtgctcctcccactacaaccgctacgtgaagaaggccaagctgcccaccgagctggccgagtacgagagcatcatgacccggatcgagccctggaaggagcacttcgaggagctgagcaagcagatcgaccacatctccacccggggcatctgggacaaggccaccaaggacgccaagatccgcaagaagaaccggctgctgctggagaagaagtactggcagggcaagtacaaccggttcaagatgaccgaggtgccggagggcttcgccctccggcagggcgccgggatcgggatcatcagcaagtacgccgccctgtacctgaagtcctacttccacgacagcctgcaccccgagcggcggcaggtgtacagcatcaagggcgccctgaccaaggagttccgcacgatgtggggcatccagctggagcacgagaagaagtcccgggacaaccacacccaccactgcatcgacgccatcgtggtggcgtgcatcgggaagaacgagatctccaagatgggggagttcttccacaccgaggagcgctacaagatgggggagggccagcggccccctcagttcgagaagccctggcccaccttcacccaggacctgaagcagatcaccgaggagctgctggtggtgcacgacacccccgacaacatgcccaagcgggcctcccggaagatcgagatctccgggggccggcgggtcgtggccaagggggactgcgcccgcggctccctgcaccaggacacctactacggggccatcgagcgcgacggcgagatcaagtacgtcgtgcggaagcccctgtccagcttcaccaacatcaaggacctggacaacatcgtggacgacgccgtccgccagaccgtgctgaacgccgtggagggcaaggacttcaagaaggccatcgccgagcccatctacatgaacgaggccaagggcatcctgatcaagaaggtgcggtgctacacccccaccgtgacccagcccctggacatccggcgccagcgggacgtgtcccgcaaggagtacaagcagcagttccacgtcatgaacgacgagaactacatgatggccatctaccagggcatcgtgaaggggaagcgcaagaccaagttcgccctggtgaacgccatggacgccgccaagttctacaagcggtccaccgaccgcaacgactaccccagcctggtgcccgaggacaaggacgggctgcccctgaagtggtgcgtgcggaaggggacccagctgatcatgctggaggaggacgaggagtccgtgtccctggccaacgaggaggagatgtccaaccgcatgttcaccatcaccaagatggacaaggtcggccggctgacctgccggaactccaaggaggcccggaccgccggcgacctgaagtccttcgtgaacgccaaccccttcaagctgaaggacgggtaccggcccatcctgtgcatgtcccccatcaacttccacttcctggtggaggggtacgacttcaccatcagccccctgggggagatcaagctgaagcac

SEQ ID NO: 104 - DNA, 3621 bp, synthetic construct
  source 1..3621: mol_type = other DNA
atgaacaagaagcggatcctgggcctggacaccgggaccaactccctgggctgggccatcgtcgaccaggacgagtccggccagtacaccctgatcgacaagggcgtggtgatcttccaggagggggtgaagatcgaggggcccaaggagttctccaaggccgccgagcgcacccagcaccgcgccctgcggcggcagtacttccgccgcaggctgcggaagatcaaggtgctggaggccctggtgaagtacaacctgtgccccgccctgaccgaggaggacctgtccctgtggaagctgcggaagatctaccccaagaaggacgagttcatgcagtggcagcggaccaacgacaacgaggacgtgaacccctaccactaccggtacatctgcctgaacgaggtgctgaacctcgaccggcagcaggaccggtacaccctggggcgggccttctaccacatggcccagcgccggggcttcctgtccaaccgcctggacgtgaaggaggaggacgagtccggggccgtgaagtccgggatcgccaacctgtccaaggagatcgaggagtccggctgcaagtacctgggggagtacttctacaagctctacaaggagaagggcaacaccatccggatccgcacccggtacaccgaccgggagcagcactacaagaaggagttcttcgccatctgcgacaagcagcacctgcccgaggagatgatcgccgagctggcccgggccctgttcttccagcggcccctcaagagccagcggcagaacgtggggaactgcaccttcgagaaggggaagccccgctgctccgacagccaccccctgtacgaggagttccggatgctgtccttcctgaacaacatccagatccagggcccctgggacgaggtgtaccgccccctgaacgaggaggagcggcagaagatcgactccctgttctaccgcaagtccaagcccaacttcgacttcgaggagatcgccaagaagatcgccgggaaggggaagtaccagtggaagggggacacccagaccgacctgccctacaagttcaacttccggatgagccagggcgtgtccgggtgccccaccatcgcccagctgaaggaggtgttcggcgacgactggaagaaggggatcgccgaaacctacatgctgggcaccaagaaggacggcatgcagaagtccatcgacgagatggtgaacgacatctggaacgtgctgttctccttcgactccaaggagaaggtgaaggagttcggcatcaagaacctgcagctgaacgaggagcaggccgagaagttcagcaagatccggctgagccggaactacgcctccctgagccagaaggccatccggaacatcctgcccttcctgcggatgggcatgatctactccgacgccgtgttcttcgccaaggtgcccgccatcatcgggcagaacctgtgggaggcccggcagagcgagatcatggaggacctctcctacaccatccagatggccatcaaggagaagcggcacatcgacgaggccgtgaaggactacctgcaggacaacttcgacctgaagcccggcgccgccgggctgctgtaccacccctccatgatcgagacataccccgacgccaagcccaacaaggacggggtggtgctgctgggcagcccccgcaccaacgccgtgaagaaccccatggccatgcggagcctgcacgaggtgcggaaggtgatcaacaacctgatcaaggaggggaagatcgggcccgacaccgaggtgcacatcgagtacgcccgggccctgaacaacgccaacatgcgggccgccatcaacgagctgcagcgggagcaggaccgcaagcacaagcagtacgccgaggagatccggcagctgtacaaggaggccaccgggaaggacatccagcccaccgaaaccgacatcctgaagtaccagctgtgggaggagcagggccacatctgcctgtacaccggggacaagatcggcatcgccgacttcatcggcgccagccccacctacgacatcgagcacaccatcccccggtccgcgggcggggacagcacccagatgaacatgaccctgtgctcctcccggtacaaccgggaggtcaaaaagaccaagctgcccaccgagctggccgagcacgagttcatcatgacccggatcgagccctggaagcagcggatcgaggagctgcggaagcagatcgaccgcgacaagaagggcaacgagtccgacaaggcggcccgcgacaagcggatccgccggaagaacctccacatggaggagctgaagtactgggagggcaagtacgaccggttcacgatgaccgaggtgcccgagggcttcgcccgccggcagggcgccggcatcgggctgatctccaagtacgccgccctgtacctcaagagctacttccacgacaccctgcaccccgaccggcggcaggtgttctccatcaaggggaccgtgaccagcgagttccggaagatgtgggggatccaggacgagtacgagaagaagtcccgggactcccacacccaccactgcatcgacgccatcgtgatcgcctgcatcggcaagaacgagttcaacatgatggggaagtaccaccacgacatgtacgactacaacgagggcaacgggcccaagccccagttcgacaagccctggcccaccttcacccaggacctgaagcagatcaccgaggagctgctggtggtgcacgacaccagcgacaacatgcccaagaaggcctcccggatgatcgaggtcaacgggaagaaggtggtggccaagggcgactgcgcccggggctccctgcaccaggacacctactacggcgccatcgagaaggacggcgagatcaagtacgtggtgcggaagtcgctgtccaccctgaaggagagcgacgtggagaacatcgtggacgacgtggtgaaggagaaggtgaagcaggccatcgccgagaagggcttcaaggacgccatggccggcgacatctacatgaacgaggccaagggcatcctgatcaagaaggtgcgctgcaagaccggggtgacccagcccctgcagatccgcgagaagaagcggcgggacctgtcccgcaaggagtacaagcgccccttctacgtcgtgaacgacgagaactacatgatggccatctacgagggcggcaagatgcagatggtgaccgccctcgacgccgccaagttctacaagcggtccgccgaccgcaacgactaccccaccatcgcccccatggagtacaaggggcggaagctgaagtacctggtgcggaagggcacccagatcctgatgctggagaagaacgaggagagcatctccaccaccaacccccaggagctgttcaagcggctgttcaccattatggtgctggagaaggacgggcggctgatgctgcggcacagcagcgaggcccgccccgccaccgaggtgaagaagctgctcacctacaaccccttcatgctgaacgacgacacccgccccatcctgcgggtgtccctgagcaagctgaacttcctggtggagggctacgacttcaccatcacgcccctgggggagatcaagctgatccac

SEQ ID NO: 105 - DNA, 3786 bp, synthetic construct
  source 1..3786: mol_type = other DNA
atgaccaagaacctgaagtactacctgggcctggacctgggcatcagctccgtgggctgggccgtcatggccgaggacgtgaccaccggcaagcacaccctgcacgacttcggggtgcgcctgttcgacgtggccgaggagagcaagaccaagacctccctggccaccaagcgccgggagttccggagcacccggcgcctgatccggcggcgcttccaccggctggagatgctgaagcgccacctgaaccagatcaacctgttcgacaagcaggccttcatcgacaacttccagacccagttcaaggtgaccaacaagatcgtgttccagaacaaccagtggaccaccgagagcgggtacttcaacccctacgtgctgaaggccaaggggctggactacaagctgtccaaggacgagctgtacgtggtgctgatcaactacgccaagaagcggggctacgccgacaagttctccctggagaacgacgagaaccagtccaaggacgacaagaccaccaaggccaagaccaccaagctgaccgacagcgccaacaaggccagcgagctgatcaagaagtaccagtccatcgccaaggccgtgatccaggacagccagttccacctgagcgccagcaagaccacccggatcctgttcaccaagaacagcagcaagctggtgtacaagaagtccaagagcgaccagtacaagaagtacatcgacgtgaacagcgtgatcgacaagaagcagcgggacgagctgtccaagcggatcaacttccggcacctgttcgacaggcaggactaccagaacgaggccaagaccatcctgtcgaagcagaagcagtactaccccaaggagctgaccaacgagaactgcgagaagatcatcaagatcatcttccagtctcgggacttcgagatgggggccaagtgcaacgactgcaccaaggtgatgatcgacagccccgacagctaccagaaccagctgcacaagtgcaagaacaagcactgcagcaacttcgggatcttctgggacatgaccgggaagtgccacttctaccccaccgagaaccgggggaccaaggccagcatcctgttcaccgtgttctactacgtgaacgagctgagcaagatctggaacatcctggccaaccacaagctgatcctgacccccaccgagaagcagtccgtgctgcagcagatgctgaccagcgactggaaggaccggcgggccgccatcaagctgatccagatcgccatccaggccagcgccgcctggaagatccacggcaacaaggacctgctggactccaagaagatcaagatctggcagagcgagaagtccagcgggctggagctgaagcggccctccttcttcaagacctgctgggaaaccagcaccctgaagcccttcctgaccaagatcaccatcaacgagaagaacatcgaccagtgggagaagaacctgatctcccagatcgggtccttcaccagccggtggatcacgccccaccggcggaagaaggccatcgagaacctgctgaacaagttccagatcaagttcgacgccaagacgatgaaccagttcctgagccccaagctggtcacgtcccccgccaacgtgagcttccagttcatgaaggaggccatccaggcctacctgaagggcatcaacttcgccgacttccaggccgagaaggtgaagcagcaggacgaggtcatccagacccggttcaagaagaacagcaacagcaagaagctgttcgccaagttcaccgacctggagatgacctccaaccccgtggtgttccgggccatcaaccagacccggctgatcctgaaggccctgcacaagaagtacacccagttcgagaacatcgcggtggaggtgggccgggacatctacaagtccgccaaggaccgcaacaagatcgagcaggcccaggacaagaacctgaagaagaagatcgccatcatccagaagctggccgagaacaacatcccccagaaccaaaagaccatcctggcctacctgctgtgggagcagcagaacaagcagtgcatctacagcggcaagaccatcgacctgaaggacatcaaccccgtggacaagatggtggagatcgaccacatcatcccccggtcctggagcgccgacgactccaggaacaacaaggtgctggtgctgaccgaggagaaccagcagaaggggcagcagatcccctaccagtacctgaagaacaactggaaaaccttcacgatgcggatccacaagctggagaactacctgggcaagaccaagaccaactacctgctggccaagaccgtcgaggaggccgtcgagggcttcgccagcaggaacctgaacgacacccggtacatctccaagtacatccacaactacctgctgtccgagttcaagaaccaccagatcaagaccaacgtgttcgccgtggtgggccaggtgatcagccggctgcggcggaagtggctggccagctccgcctgggggctggaccagaaggtgcgggacatcagccccttccaccacgccatcgacgccagcatcctgtgccagttcaagaagaagatggacatcgagctggccgtcgacctgatcaagctgaaggacctcaagaccgccatcgaccggttcgagagcgagggcaaccccaccaagctgaccaacgccctcgccaacaagaacgccttcatggagtccatcaagaacaagatcaagaccctcaagaccgcctccaagaacgaccagaagaagcggttctacaacgtgaacgagtacatggagcggatctacctggccgaccgcaagaaccagttcgtgaacaacctgtacatcgacgatttccagaaccagctggagaagcggatccccgtggagctggagatcctcgactgcaagtgcttcgacaccgagacaaagaagatcctgaacctggcctgccagaactgcaacggcagccggaagctgcccaagtacgtgaacgtgctgaacgaggaggagtggaagatcgccaccaaggacctggacaccaccaacatcgacctgcactacccccacatcagccggatggtgcggtacaaggtgcgggggcagatctcctcctccgagaacctggggttcgtgctgaacggcctgcccaaccccaagaaaaccatcctggagaagtccaagaacaagctgttccggctgtggctgcggaacaacaagatcacctacaccgacgccaagaaccagatcaacaacatctacttcagcaacgactacttcaacaactggatcatcgagttctgcaactggaaggaccccaagaacaagtccaagcccttcatcaccagcgggaacgtggacggcaaggtgggcaacatcatcgagatcaagcggttctacgggctcaagacgcccctgcagaagctggactccagcaaccagcagaagaaccagtacgagtggatcagcatctacgacgccaagaagaacaagaacctgttccaggactactccaagatcctgctgcacaacaagctgatcaagtactacgacaacaagatctacaacaagaacctgaagaagaacgggaagtacatcgtgaagtgcttcttcagccggaaggacgagaagaaggcctacctgtccgtgaacagcctgaccaagtccaccgacaagacccagaagatcttcaacttcaacaacagcgtggacagcgtgtccaacctgttcaagaacaagtggtccctgatcgaggtggacctgctgggcaaggtcatc

SEQ ID NO: 106 - DNA, 3195 bp, synthetic construct
  source 1..3195: mol_type = other DNA
atggacaccccctacctgctggccctggacctggggaccagcagcatcgggtacgtcgccttcgccctggacgacagcgacgagcccaagtccatcctggacctgggggtgcggatcttccccgacggccggcaccccaagaccaaggagcccctggccgtgtcccggcggatcgcccggggcatccgccggaaccgggaccgggggcagaaccgggtgcggcggctggtgaaggagctgatcgagttcggcctgttccccgtggacgagcgggagcggaagaaggtgttcgacaccgtgagcccctactacgcccgggccgccgccgcccaggagctggtggacaaggaaaccctgggccgggccatcttccacatcggccggcgccggggcttcaagtccaaccggctggccggcgagtcggaggagtccgagttcaaggagaagatctccgagctgcggaacaagctggagggcaagaccctgggcgagtacctgttcgagcgggagaagcagaaccaggccctggccaaggacaagaaggcccacgaccagaagcccttccgcttccgcaacggcgagacagacttctacgccgaccgccagatgtacctggacgagttcgagcggatcaaggccgtgcaggggaacatccacctgaacgacgagcagtgggccgccctgaaggagactgccttctggcagtaccccctgaagcccgtgcccaagggcaagtgccggtactaccccgaggagaaccgggcccacatcgacctgcccatcagccacgactaccgcatctaccaggaggtgaactccctgcggtaccagtcccagaacatcgagtacagcctggacgaccggcagcgcaaggccgtgtacgactacctgcgcagccacaagacgatgaccttcaagcagatgctgaagctgaaggagcagaagtccccgctgttccccagcgacgcccagttcaacctggacgtcgccagccggaacggcaagctgatgggcaacaagaccctggtcgacttcatgaagaaggagctgctcggggccatcgccgagaagatcgactacgtggccctgaacggcatcgccgacctgctgatcgagcccctggaggagatcaacggcaagaaggtggtgatggaaaccgagaaggtggccctggagctgaagaagcggatccccaacctgtccgacgagcagatcgagaacctgtgcaactacaggttcaagcgggacaccgccggggtgtcccgcaagttcatggagcagatcaaccccgtgatgcgggaccagggcctggtgtacagcgacgccgtggcccagctcaaggacgacaacgggcaccccttcaaccacacctacggcaacaccggcgaggtgctccagcggctgccctactacggcgaggtgatgcccgagtccgtgtggggcgcccagcccgaggcggacaagaacaagagccccctggagcgggacgacgacgcctaccagtacggcaagatcgccaaccccaccgtgcacgtggccctgaaccagctgcgcgtggtggtgaaccgggtgatcgacaagctgggctccgtgcccgccaagatccacgccgagctcacccgggacctgaagaacagcaaggacgcccgggagcagatcgagaagcagcagcggaagaacaagatcaagaacgacgagatccggcgcttcctggtggacgagctggggatcatcaaccccagccgccgcgacttccagaaggtgaagctctgggaggagctgggcaagcagggggcccggttctccgtgttctccgggcagtgcatctccgcctcccagctgttcaacggggaggtggagatcgagcacatcgtgcccttctcccgctgctacgacgacggcatggccaacaagaccctggccttcaagaacgagaacaaccagaaggggaacctgaccccgcacgaggccttcgccggggccgggtcccagtacagctacgacgacatgctgaagcgggccctgagcgtgttcgggcagacctccaagtacgagcggttcaaggaggacgcctacgagcggttctacgggggcgagaagggcgacatgatcgcccggcagctgaacgacaccaagtacatcagccggaaggcccaccagtacctgagctgcctgtgcacccagcacaacgtggtgtccgtgaacggcatgatgaccgccgtgctgcgggacgtgtggcagctcaacaacttcaaggaccgggccaccggccactaccgcgaggaccaccgccaccacatcgtggacgccttcgtggtggggctgacctcccggtccctgatcaaccgcctgaacaccaggcggagcaccgtggaccagacccagaaggacctgtaccacttcctgaagtccagggtgaacgacatccccgagctcaagaaggagctgttcaagaagctggacctggtggtggccagctacaagccggaccgcacccagaccgggtccatgttcaacgacaccgcctacgggatcaagtccaccgaggacgacaccaagtacgtgacccggaaggccatcaccgccctgaccgagaaggaggtgctggccatccgggacagcgagatccggcagaacctgatcaagcacctgaccgggcggctgaccgtggagaacctccgcgagttcaaggtgtccctgggccccgggaaggacttcatcgacaagaaggcctccttcgccaagaaaaccggcatcaacaaggtgcggatcaacgtgcccaacacctccatcgaggcgatcaagtccgcctcctacaaggggtacgggaagaacagctacgccttctgcgacgtgtggatgatcccccacaagaaggacaagaagtccggggagtggctgtaccgcttcgagggggacttcgtggccttcgccgacgcgaagcaccacgaccccgagagcttcaaggtggggcggcaccccgccatgaagaagctggtgcggatctacaagcaggactgcttcacgatgaccaacaagctgaccggcgaggccgagcacatccggatcgccgggtacgacgccagcaagaacaagctggacgtgcgggagaacctgaaggccgtgaacgagaagcagaaccacatctccatcaacaccctgttctccaaccaccagttcaagaagctgcggctg

SEQ ID NO: 107 - DNA, 3162 bp, synthetic construct
  source 1..3162: mol_type = other DNA
atgctgaagtaccgcatcggcatcgacctgggcaccaacagcctgggctgggccgccatccagctcggcagcgagctggagccccggcagctgctggacctgggcgtgcggatcttcagcgacgcccggaaccccaaggacaagtccagcaacgccgcccagcgccgggagccccggggcgggcggcggaaccgggaccgcaagctgcagcggtcccggaagctgctgcggaacctgatccagtacgggctgctgcccgagcaccagaccgagcggaagatgctcgagtcccaggacccctggtccctgcggaccagggccctggacgagcccctgagcccccaccaggtggggcgggccctgttccacctgaaccagcgccgggggttcaagtccaaccgcaagaccgacggggacaacgacgggaaggtgcacgacgccatcgcccggacccacgacagcctgaacctgcacaacgcccggaccctgggcgagctgttcgggcggccccggctggagcagatgcggaccaacgagtccgcccccaaggggtcccggaagcccctgcccctggcccgggtgcggagccgggggcagggcgccaagatggtgtacgactactacccccagcgggacatgatcctggacgagttcgagcagatctggtccagccaggccaagttcctgcccgacatcctgaccagcgaggcccacgactgcctgcgcgagatcatcgccttccagcgggagctgaagaagcaggatgtgggcaagtgcacctacatcccggagtacccccgggcccccaaggccctgcccagcgtgcagcggaagcgcatcctggaggaggtgaacaacctccgggtggccgccaccggggaggccagccgggtgctgagctccgacgagcggaagatcctggtggacttcctgcggctgcccagctccaagatcgggaagcggaccttcgaccggctgcggaagcagatcaacctgcccccgagccagcgcttcaacctggagagcctgaagcgcaccttcctgcagggcgacgagacagccgcccggctgatgcagaacgacgccttcgggaaggcctggctggacttcgacctgacgatgcaggacgagatcgtcctgcgcctgctggaggaggaggacgaggacgagctgatcggctggctgcagtccgagcacgggctgaaccccgacgtggccatgcggatcagcgggatcagcctgcccgacagctacgggaagctgtccctggaggccatcgagcggctgatcccccggctggaggccggcgagcggaacgacgaggccgccgccgccgagttcggggaccaccgggccctgggcgacggcgagatccacgaggacggcctcccctactacggggagctgctgaaccggcacaccgccttcgagaagtccgaccccaagaacgacgaggagcggttcggccgggtggccaaccccacggtccacgtggccctgaacgagctgcggaaggtcatcaacgacctgatccgccgcttcggcccgcccacccaggtggtgctggagctggcccgggacctgcccctgtccgaccgggggctgaaggacctggagcgccagcagaaggacaaccaggactccaacgacaaccggcggaaggagctggagaagctgggggtgatcaacaactacgacaaccggctgaagctgcggctgtacgaggagctgccccagctcaacaagtgctgcatcttcagcgggaagcccatcagcatcaccgacctcttctccagcgacatcgagatcgagcacatcctgcccatcggggagtccctggacgactccttctccaacaaggtgctcagcacccgggaggccaaccggtacaagaagaagcggagccccttctccgccttcggggcctccatcgacggctacgactgggagcaggtgtcccagcgggccaccgacctgccgcccaacaagcggtggcggttcgcccccgacgccatggaccggttcaccgacgagtccaacttcctggaccggcagctgaacgacacccggtacatcgcccggctgggcaagaccttcgtggagggcctgttcggcgggcagggggcccgcgggcaggagaactccgtgtgggtggtgtccggccggctgacctccgacctgcggcacttcgccggcttcaacggcctgctgtccgacgacaacaagaaggaccgcaccgaccaccggcaccacgccatcgacgccgtggtgatcagcctgaccgaccgcacgatggtgaagcgggccgccgacctggccaagcgcgaggaccaggtggcccactacgagatcatgaaaacgatggccgagccgctgaagcggtaccgcaagtccgtggaggaccggctggccaagatgacggtgtcccacaagcccgaccacgggttccaggacgccatgcacaacgacaccgcctacgggatcaccgggcagcacgacgagaagaaccagagcatcctggtgacccggaaggccctggacagcttcgagaagcggagccagctggacgccatccgggacgaaaccctgcggcggatcttcgtggaggccaccgagggcctgacgaagtccgacttcacccacgccctcatccaggagggccggagccagagcccgcccgtgtacaccgtgcgggtgaccacccccatgaaggacacctccttcgtggtcatcgagcacggcgacggccacaagaaggcctacaagggcgacggcaactactgctacgacatctggaccgacgagcggggccgctgggtgggggaggtgatcaccaccttccaggcctaccagaaggcccggaagaaccccaactggtggcggaaccgcaccgggggcaacggccagcccctggagatgcggatccgcaagggggacatgctggagatcgacgaccccgccgggcggcgcaaggtgatggtgtacaagttctccaaggggaagatctgcatggccgaccacaacgaggccgacgcctccggccggatccgctccggggagctgatgcagacccagatggccccctccagcctgcagaccgtgtccgccgtgcagatctccgtgagcccctccgggcggatccaccgccggaaccacctgaag

SEQ ID NO: 108 - DNA, 4494 bp, synthetic construct
  source 1..4494: mol_type = other DNA
atgaagcggatcctgggcctggacctgggcaccaactccatcgggtgggccctggtgaacgaggccgagaacgagaacgagaagtccagcatcatcaagctgggcgtgcgggtgaaccccctgaccgtggacgagcagcagaacttcgagaaggggaagtccatcaccaccaacgccgaccgcaccctgaagcggtccatgcggcgcaacctgcagcggtacaagctgcggcgcgccaacctgatcgaggtgctgaaggagaagcagttcatcaccgaggagacaatcctcagcgagaacggcaactacagcaccttcgagacttacaagctgcgggccaagtccgccaccgaggaggtgagcctggagcagttcgcccgcatcctgctgatgatcaacaagaagcggggctacaagagctcccgcaaggccaagtcccaggacgagggccagctgatcgacggcatggagatcgccaagcggctgtacgaggagaacctgacccccgggcagttcgtgtaccagctgctgctggacgggaagaagttcatccccgacttctaccggtccgacctgcagtccgagttcgacaagatcttcgacaagcagctgagcttccacaccgagttcctgagcaccgagctcaaggaggagctgcgggggaagaagcgcgacgccgtgtgggcgatctgcgccaagtccttcaaggagaagggcttcgagctcgtggggatcaagcggcagggcaagacctacgagcagaaggtggagaactacgcctggcgcgccaaggccgtgaacgagaagctggacctggagcagctggtgatcgtgctgcagcagatcagcatccagctgaactccagctccggctacctgggcgccatcagcgaccgctccaaggagctgttcttcaacaagcagaccgtggggcagtacctgatggcccagctgaacgagaaccccaacaccagcctgaccaaccaggtgttctaccgccaggactacctggacgagttcaacagcatctgggagactcaggccaagttccacaaggagctgaccgaggagctcaagaccgagatccgcgacatcatcatcttctaccagcggcggctgaagtcccagaaggggctgatcagcttctgcgagttcgagagccgccagatcgaggtggagatcgagggcaagaagaagatcaagaccgtggggctgaaggtgtgccccaagtccagccccctgttccaggagttcaagatctggcagaagctgaacgacatcgagatcttccccgccaacgagaagaagaagaagtacaagcccaacgccaagcggctgaaccaggagcagaaggagctgctgttcaaggagctgtccggcaaggagaagctgaccaagaaccagatcctgagcctgctggacatgcaggagttcgacatgaacttcaactccatcgacggcaaccgcacccaggccgagctgctgaagaagtacaaggagatcatcgagctcagcgggaagaagatcgagtccaacgagactaccgacaacgagatcaacatcatctccaagaccttcaacgagctgggctacaacaccgacatcctgtacttcaacagcgacgtggagaacctggacgacgagcccttctacatgctgtggcacctgctgtacagcttcgaggacgacaagtccaacaccgggaacgagagcctgatcaacaagctcatgttcgagtacgggttcgaccggtccagcgccagcatcctggcctccgccaccttccaggacgactactccagcctgtccgccaaggccatccgcaagatcctgccccggatgaagcagggggaggactacaccaccgcctgcgcctacgagtacggcaagcactccaagaactccctgaccaagaaggagctggagagcaagctgtacaagaaccacctggagatcatcaccaagaactccctgcggaaccccgtggtggagaagatcctgaaccagatggtgaacgtgatcaacgccatcatcgacgacccccagctggggaagcccgacgagatccggatcgagctggcccgggagctcaagaagtccgccgacgagcggatcctgctgaccgagtccgtgaagggcaacaccgaggacatccagcggatcaagaagcggctgaaggaggacttccccatcttcaagaccaacgagccctcccggaacgacatcatccgctacaagctgtgggaggagctggcccccaacgggcacaagcccctctacggcaacaaggagaacctgaagaaggagatctcccccgccatcctgttcagcaaggagatcgagatcgagcacatcatccccaaggcccggctgttcgacgactccttctccaacaagaccctgatcttctcctccgacaacaaggacaagcgggagcggacggccctggactacgtgtcccaggacttctccgacgacttctccaactacatcaaccgcatcatcaccgtgttcggcaccaagaccaccaagcgggtgaacaagctgaccaagcggatcgagacagacaccaagaccttcgactccatctacaaggagcacgagcggtccctgcggaacaacaagaagcagaaggagaagctggccaagtgggacagcagctccgaggacgagaagaagaagcagaagaagccctgggaccgcatgtccgacaccgagcggaacctggaggtgatcgagaagtactactccgggaagctcggcaagctggccctgtccgagaaggacctgcccgagggcttcatcaaccgggacctggccaacacccagtacatcaccaaggaggccaagaagatgctgggcgacctggtgaagttcgtgaccagcaccaccgggtccatcaccgaccggctgcgggacgactggcagctggtcgacgtgatgaaggagatcaactaccccaagtacgagaagctggggctggtggaggacgaggagcggatcgactacaagaccggggagatccgctacaccaagaagatcaaggactggaccaagcggaacgaccaccgccaccacgccatggacgccctggccgtggccttcaccaagcgccagttcatccagtacctgaacaacctgaacgcccggcggaccaacgaggagcaggggatctccaacaccgagaaggaggagcacgacaacttcgccatcaccgccgaggacgtcgtgctcaacacccgcgacgtgctgggcatcgagaagaactacctgtaccgcgacaagcggaacaagctgcgcttcaacccgcccatgcccctggacgagttccgggccgaggccaagaagcacctggagaacaccctgatctccatcaaggccaagaacaaggtggccaccatcaacatcaacaagaccaacaagtccgggggccagaacaagaagcagcagctgacccccagggggcagctgcacctggagacagtgtacggctccgcccagcagtacgtgaccaagatcgagaaggtgggcgccggcttcaacgaggagcagatcaacaaggtggccaagaaggcctaccgggaggccctgctgaagcggctgatcgagaacgggaacgaccccaagaaggccttcaccgggaagaacagcctggagaagaaccccatctggctggacgagctgcacaccatccaggtgcccgacaaggtcaagaccgtgtccaccgagacaatctacaccatccggaaggagatctcccccgacctgaagctggacaaggtgctggacgccaagatcaagaacatcctggaggcccgcctgaaggagtacaacggcgacaacaagaaggccttcagcaacctggacgagaaccccatctggctgaacaaggagaaggggatctccatcaagcgggtgaccatcaccgggatcaacaacgccgtggccctgcacgacaagaaggacaaggacggcaagtgcatcctggacgacaacggcaacaagcaggccgtggacttcgtgaacaccgggaacaaccaccacgtggccatctaccgggacgagaagggcaacctgcaggagaacgtgatcagcttcttcgaggccaccacccgggtgaacctgggcctgcccatcatcgacaaggagtacaaggagggcgaggggtggcagttcctcttcagcatgaagcagaacgagtacttcatcttccccaaccagcagaccggcttcaaccccaacgagatcgacctgctgaaccccgagaactactccctgatcagccccaacctgtaccgggtgcagaagctgagcaccaagaactacgtgttcaaccaccacctggagacaaccgccgtgaccggcgacaccctgaagaacaagaaggagctcagcaacatcacctaccgcttcatccagagcctgcccccgatccagaacatcgtgaaggtgcggatcaaccacatcgggcagatcgtgtccgtgggggagtac

SEQ ID NO: 109 - DNA, 2973 bp, synthetic construct
  source 1..2973: mol_type = other DNA
atgaccaagaccaccctggggatcgacctggggaccaactccatcgggtgggccctgctgaacgagaagaaggagcagatcatcgccaccggggtgcggatcttccccgagggggtggaccgcgaccagaagggcggcgagatcagcaagaaccagacccgccgcgagaagcgggggcagcggcggcagaccgcccggcggcggagccgcaagcaccggctgctgaagcagctgatcgaggtcggcctgctgccccagcagcaggacgacttctaccccctgctgaccaacccctacgagctgcggaagcgggggctggacgagcagctgtccctgcaccagttcgggcgggtgctgctgcacctgaaccagcggcgggggttcaagtccaaccgcaagagcgacaagcagaaccagaaggagacttccgacatgctgaaggagatctcccagctggagtccgacatccacgagaacgggtgtcggaccctgggggagtacttctacaagatccagaacaccgacagcaacgacaagaagcagaaccacatccggctgcggtcccaccacacccaccgggagatgtacgagaaggagctggagctgctgtggcaggcccagcagaagttctaccccgaggtgctgatcgacgacctgtacgacgacgtgcggcagacgatgttcttccagcgggacatgtactgggaccccaagaccatcgggctgtgcgagctggagaaccagaagcgctgcccccgggccgaccgcatggcccagcggttccggctgcggcaggagatcaacaacctgcggctgctggacgagtccaccggggaggtgcggtccctgaacgccgaggagcgcgagaaggtgtacgagaagctctccaccacccgcgagcgctccttcgacaagatccgcaccgacctggggttcgacgagcactgcaagttcaacttcgagaacggcaagcggaacaagctgaaggggctggagacagacgccatcctgtccgggaagaagtacctgggcaagaagtggttcgagtacagcgaccagcggaaggacgagatcgtgtactgcatcatcgacgagaagctcggggaccacgacttcctggacaaggcccagaacgagtggggcatggacaaggagacagccgagaacctgctgggcgtgaacctgcccgaccactacatgaacttctcccggaaggccatcgagaagctgctgcccgccctggaggaggggctgcccctcatgaccgacgacaagaaggagtcggccatgagccgggccggctacctgcggcccgaccagcggcccaacaagatcgaggacttcctgcccaagcccccggacctgcccaaccccatcgtgcggcaggccctgttcgagttccggaagctgctgaacgccatcatccgggagtacggcaagcccgacaagatcaacatcgagctggcccgggacgtgaagaaccccaagaaggtgcgggaggagatctcgatcaagatctgggagcggacccagctccgggagactgccaagcaggagatcgagaagctgggcgagaagcccacccgggacaacatcgcccggtacctgctgtgggaggagcaggggcgcatctgcgtgtacagcggcaacaacatctccctggcccagctgatgaagggggagatcgatgtggaccacatcctcccctacagccggtccctggacgactccctgcagaacaaggtggtctgcttccggaaggccaacgccgacaagggggaccagaccccctacgagtggctggccgagatgcaccccacccagtacgaggaggtgcagcagcgcatccggaagctgcccttcggcaagcggcagcggttcacccggaagaacgtggagctggacgacttcgtgaaccgccagctgaccgacatccagtacatcagccgggaggtcatgaagtacgtccgctgcctgggcagcgagatcgtctgcaccaagggccagaacaccagcgacctgcggcacgtgtggggcctgaacaccgtgctgaacaacgagaacctgaacatcaagaaccgcgaggaccaccggcaccacgccgtggacgccatcgtggtggccctgaccgaccggtcccggctgcagcagctggcccggtcccggaagcgcaccaagggccagatcgagttcccccacccctggcccaacttccggaacgaggccgagaagcacatcaacagcatcatcgtgagccaccgggtgcagcggaagatccagggggccctgcacaaggagacaatctacggggccaccaagaagtccggcgagtacgtgtaccgcaagctgatcaccgacagctccttcaccctgaatatggtgaacctgatccgggaccccgtgatcaaggacctggtgatcgagcggctgaagaagttcggctacgagcccggccggggcaagggcaccatcaagaaggaggtgtggaaggagcccctgacgatgctgagcggcaccctgatcaagaaggtgcggctgatcaagaagaacaagaccatccagcccatccggggcgggaacagccacgtgcagcccggcaacacccaccacatctgcctcttcaagaaggagggcaagatctgcaagatgatctccgtgcccatgatcgaggccgcccgccgggtgaaggaccacgagcccatcatccagcgggaccctccgcccgactaccccgactccgtgttcttcatgagcctgagcaacaacgagatcgtgatgctcaagcacaagggggtggaggacatctaccgcttcgacaccagcgcctccacctcccagcagatgcacttcatccaccacacctacgccgtgaaggagaaaacccccgccgtgcggctgagcaagaagcccagcaccctggacgcccggaagatcacggtggacatcctcggccggatccggaacgccaacgac

SEQ ID NO: 110 - DNA, 3381 bp, synthetic construct
  source 1..3381: mol_type = other DNA
atgacccggaacaacctgagcctggggctggacatcggcatcgccagcgtgggctgggccgtgctggactccgaccacatcatcgccctgggcgtccgggccttcaacaaggccgaggtcgcccagaccggcgagagcctgaacctgcagcgccggtccgcccggctggcccggcgcacgctgcggcaccggcgccagcggctggccaagctggccaagctgctggaggcctccggggtgatcaccaaggagcggctgtacgccacccccacccgggagagctaccccagcccctgggccctgcgggtcaaggggctggacgagtgcctggccggggaggagtggggccgggtgatctaccacatctgcaagcaccggggcttccactgggtcagccgggtggaggagaagaagtccggcgagaacgccaagcaggagggcgggaaggtgaagcaggccctgaagtccacccggggcctgttcgcctccaagaagtaccggtccgccgccgagatgatcatctcggagttccccgacgcctaccgcaacaagcacggggactacggcaaggccctgtcccgcaccctgctgagcgaggagctggagctgctgttccagcgccagagctgcctgaagaacccccacgccacggacttcctgaagaacgccgtgctggggaagggcgacaagaaaaccggcctgctgtgggagcagcaccccgccctgagcggggacgccctgctggccatgctggggaagtgcaccttcgagcgccaggagtaccgggccccgcggaagtccttcaccgccgagcggcacgtgctgctcacccggctgaacaacctgcggatcaccatcgacggggcccggcggcccctcaccgacaacgagcggcgctgcgccctgtccctgagctacgagcgggccgccgacatcaagtactccaagctgcggtccgccctggaaaagacctgcggcacccccagcgagttcgccttcgtggggctggcctacccctccgagttccagaagcaggaggagaaggccaagaaccccgaggaggccgccgtgttcaagctcccaggctggcacgagctgcggaccaccctgaagaaggccgggctggaggacgagtggaagcagctgacctgcctggccctgaagggggaccccaccctgctcgaccaggtggcctgggtgctgtccgtgtacaaggaggacgaggaggtggtcgccgccctggacgacctgcccctgcccaacaaggaggccgtgatcgacgccctcctgtccgtgcagttctccgagttccacgccctgtccctgaaggccctgcggaacatcgtgcccaagatggagctgggcctgcggtacgacgaggcctgcacccagagcggctacgaccacagccagcccttcgaccccgagcggcagaagtcccagagcctgccgcccttctacctgggccacgaccacctgagccggatgcggctcaacgaggacgtgggggacctcccccgcaaccccgtggtgatgcgggccctgaaccaggcccgcaaggtggtcaacgccctggtggggaagcacggggccccgcactccgtgcacatcgagatggcccgggacctgtcccggcccctgaccgagcggcggaagatccagaaggagcaggacgactaccgggacaagaacgacaagaaccgctccttcttcatcgagcagttcaaccgggagccccggggccaggagttccagaagctccagctgtaccgggagcagtccggcaagtgcctgtacagcctggccccgctggacctctcccggctgctggagatgggctacgtggagatcgaccacgtgctgccctactcccgcagctacgacgacagcaagaacaacaaggccctggtgctcaccaagcagaaccgggacaagtccgacctgaccccctacgagtacctgcagggggcccaggacacggaggcctggatcaagttcagcgccttcgtgaagtccaacaagaactaccgggccgccaagcggaaccggctgctgaccaaggacttcgacgaggagaacgccaaggacttccaggagcggaacctcaacgacacccggtacatctgccggtacttcaagtcctacctggaggagtacctggagctgtccgacgagtccgagcaccggcgctgcgtggtggtgaacgggcggctgaccgccttcctgcgggcccggtggggcctgcacaaggagcggtccgagtccgaccgccaccacgccctggacgccgccgtggtcgccgcctgcacccgcgggatggtgaagcggctggcggactacgccaagggccgggagctgcggtacgtgcaggccgactccatcgaccgggaaaccggcgagatcatcgatttcgaccggtacaagaagctggagaacgagttcccccagccctggcaggggttccggggcgagctgctggcccgcctgaacaccgacgacgtgtccaccctgcgggccagcctgagcaagctggggacctacagccgcgaggagatcgaggccgtgaagcccctgttcgtgagccgggccccgcagcgccgcaacagcggcgctgcccacatggacaccatctaccagcagaccacccggctcaaggacgagcgcaagatctcccagaagatcaagctcgccggcctgtccttccggcagaccaagaaaacccccaagcccatcaccgagcagatcgagcagttcgtgaagaagctggccgacccccaccgcaaccagaagctgtacgacgccgtctgcgaccggctgaaggccttcgccggcgacggcaagaaggccttcagcgccgagaaccccctgtacaagcccgacaagaacgggaaccccacggggcccatcgtgcgcaccgtcacgatgtcggagcgcatgagcgggatccccgtgcggggcgggctggccaagaacgagacaatgctgcgggtggacaccttcagcaagggcggcaagcactacctggtgcccgtgtacgtgcaccacaaggtgaccggcctgcccaaccacgccatcgtgtccggcaaggacgaggccgactggcgggaggtggacgagacattcgagttcgagttctccctgtaccccaacgacctgctgcagatctgcctgaagaagcagacccacctggggtacttcgccggctgcaaccgcagcaacggcgccatccacctgtgggcccacgaccgcagctccaaggtgggcaagaacgggctgatcagctccatcgggatccagcgggccaagcacctgaagaagttcgaggtggacgtgctgggcaaccggttcctggccaaggccgggaagcgggacggcctggcc

SEQ ID NO: 111 - DNA, 4158 bp, synthetic construct
  source 1..4158: mol_type = other DNA
atgaagcgggtgctcgggctggacctgggcaccagctccatcggctgggccctggtgaacgagtccgagaactccgacgagcagtccaccatcgtgaagctgggggtgcggatcaaccccctgagcgtggacgagctccagaacttcgagaaggggaagtccatcaccaccaactccgagcgcaccctgaagcgcagcatgcgccggaacctgcagcggtacaagctgcggcgggaggagctcatccgcatcttcaaggagtccggcttcatcgccgacgagtccatcctgtccgagaacgggaacaagaccaccttcgagacataccgcttccgggccaaggccgtgaccgagcggatccagctggagcagttcgcccgggtgctgctgatgatcaacaagaagcggggctacaagagctcccgcaagctgaagtcccaggacgagggccagctgatcgacggcatggaggtggccaagcggctgtacgacgagaacctgacccccgggcagctgagcctgcagatcttccagagcgggaagaagaagctgcccgacttctaccgcagcgacctgcagctggagttcgaccgcatctggaacttccagcaccagttctactccgaggtgttcaccgagaacctgaaggaggagctgcgggagaagaacaagaaccagacctgggccatctgcgagaagcccttcgggatcgtgggcatcaagcgcgacaccaagggctacgagctgaagaaggagaacctgatctggcggaccaaggccatctccgtgcagatggacctggagcgcctggccatcgtgttccaggagatcaacagccagatctccaacaccagcggctacctgggcgccatcagcgaccgctccaaggagctgtacttcaagaaccagaccgtggggcagtacctgatgaagcagctggacaccaaccccaccgccagcctgaagaaccaggtgttctaccgccaggactacctggacgagttcaacaccatctgggagtcccagagccggttccacaaggagctgaccgaggagctgaagaaggccatccgggacgtggtgatcttctaccagcggcagctgaagtcccagaagggcctgatcagcttctgcgagttcgagtcccgccagatcgagatcgaggtggacgggaagatcaagctcaagaccatcgggcagcacgtgatcccccggtccagccccctgttccaggagttcaagatctggcagatcctgaacaacatcgaggtgatcgtgaagggcaagaacatccgcaagcgggagctgtccatcgtgcccgacgacatcgagaacctgctgatgaacgagggccggcggaagctccaccaggaggagaaggagcgcctggcctccgagctctccatcaaggagaagctcaccaaggccgaggtgctcaagctcctcttcgagaacccccaggagctggacctgaactacgagagcatcgagggcaaccgcacccaggcccggctggtggaggcctacaagcagatcatcgagctgaccgggcacaagatcgacctgaagaagtccgccgaggagatgctcaagagcatctccgacatcttcagggccctggagtacaacgccgacatcctgtacttcgacagcgagaagccgctggacaagcagcccatgtacaagatctggcacctgctgtactccttcgagggcgacaacagcaagaccggcaacgagaacctgatctccaagctgagcgagctgtacggcttcgaggaggagtacgccagcatcctggccaacatcaccttccaggatgactacggcaacctgagcgccaaggccatccggaagatcctgccctacctgaaggagggcaacatgtacgacatcgcgtgcaagtacgccggctaccggcactccaagtcctccctgaccaaggaggagatcaagaaccggcccctgaagaaccggctggacatcctgcccaagaacagcctgcgcaaccccgtggtggagaagatcctgaaccagatggtgaacgtgatcaacgccatcatcgacaactacgggaagcccgacgagatccggatcgagctggcccgggagctgaagaagaacgccaaggagcggcaggacctgacccagatcatcaacaagaccaccacggagcacaaggccatcaaggacaagctgaacaaggagttcggcctgccccacgtgagccgcaacgacatcgtgcggtacaagctgtacgaggagctgaagatcaacggctacaagaccctgtacagcaacacctacatcccccaggagaagctgttctccaaggagttcgacatcgagcacatcatcccccaggcccggctgttcgacgacagcttctccaacaagaccctggagagccgcaccgtgaacatcgagaagggggacctgaccgcctacgactacgtgcggaacaagaccgacgccaagggcctggaggactacctgtcccgcatcgaggacctgctgaacaccggcaacatcagcaagaccaagtacaacaagctgaagatccaggaggaggacatccccgacgacttcatcgagcgggacctgcgggacacccagtacatcgccaagaaggccaagacgatgctggagtccctggtgcgccgggtggtgtccaccacggggagcatcaccgccaagctgcgggaggactggcagctggtgaacgtgatgcaggagctgaactgggacaagtacaacaagctcggcatgaccgagatcttcgaggacaaggacggccggaagatccggcggatcaagaactggtccaagcggaacgaccaccgccaccacgccatggacgccctgaccgtggccttcaccaaggacgtgtacatccagtacttcaacaacatcaacgcccggtacgacaagaacagcaacgcctacgccatcgagcagaagtacttccacgaccgcaaggtggtgccgcccatgcccctggacatgttccggagcgaggccaagcggtacctggagaacaccctgatctccatcaagaccaagaacaaggtggtgaccaacaacatcaacatcaccaagaacaaggccggcaccaacaagaagcggcagcagacccccagggggcagctgcacctggagactatctacgggtcccagaagcggtgtatggtgcgggtggagaagatcgacggcaagttcgacaccgccaagatcgagactatctccaaggacaccttcaagaaggccctgctcgaccggctgcacctgtacaacgatgacgcccagaaggccttcaccggcaagaacggcctgagcaagcacccggtgtacatcgtggacaacgccggcacccggcacagcctgcccgagaaggtcaagaccgtgaccttcgagacagtgtacaccatccggaaggagatcgcccccgatctcaagatcgacaaggtggtggacaagcagatccagcggctgctggagcagcgcctgtccgagttcaacggggacaagaagcgcgccttcagcaacctggacgagaaccccatctggctgaacgaggagaaggggatctccgtgaagcgggtgaccatcagcggcatcagcaacgccgagcccctgcacgaccgcatcgacaaggacaagaacctgatcctggacgacaacggccacccggagcccgtggacttcgtgaacacgggcaacaaccaccacgtggccgtgtacatggactccaacggcgacctgcacgagaacgtgatcagcttcctgaaggccgtgacccggaagaagctgcgcctgcccatcatcgagaagaactacaagtccgaggaggggtgggtgttcctcttctccatgaagaagaacgagtacttcatcttccccaacaaggaaacctgcttcaaccccaacgagatcgacctgctggacaccgacaactactacctgatcagccccaacctgttccgggtgcagaagttcaccatccgggactacttcttcaggcaccacctggagacaaacgtgtccaacgacagcgagctccggggcgtgtcctggatccgctgcgggctgaacgacatcaagggcatcgtgaaggtgcgcatgaaccacatcgggcagatcatctccgtgggggagtac

SEQ ID NO: 112 - DNA, 4047 bp, synthetic construct
  source 1..4047: mol_type = other DNA
atgaagcaggactacttcctgggcctggacatcggcaccgactccgtgggctgggccgtgaccgacacctcctacaaggtgctgaagtgcaacggcaaggccctgtggggcgtgcggctgttcgacccggcccagcccgcggaggagcggcggatggcccgggtggcccggcggcggctggagcgccgcaaccagcggctgaagtggctggagcaggtgttctccgaggagatcgccaaggtggaccccgccttcttccagcggctgcgggagtccaagttccgggaggaggacaagaagtccgactaccccctggggcggtacaccctgttcgccgacaaggcctacggggacaaggacttccaccgggactaccccaccatctaccacctgcgccgggccctgatcgccgaggcccaccccttcgacgcccggctggtgtacctggccgtgcaccacatcctgaagaaccggggccacttcctgttcggcgacatgtccatcgacgccatcaccttcgaggccagcttcgagaagctgcgccagcacctgctggaggcctacgagctgaagctggaggtgagcgacctggacagcttcagctcggtgctgaccaacaggaagctgagcatcaccgccaagagcgccaagctgatcgagctggccgggctgcccaaggagaagggccccgtgcaggccatgatgcagctgctggccgggcggaaggtggccctggacgccctgttcgacgaggagctgcccacggacgacgtgcccagcttctccctgcgggacgacttcgaaaccgtggaggggaagctgatcgaggtcctgggcgacaggatcgacctgatccacctgctgaaggagatctacgactgggccctgctggccgagctgctgaacgggtaccggtacctgagcttcgccaaggtgcagtccttcgagaagcaccgggtggacctgaagcggctcaaggggatcctgaaggccgtggacggcaaggcctacgccgagatgttcaggcacgccaagaaggacctggacaactacctggcctactgcggccacggcgccaagggctaccactgcgacgccgacgcgttctacaagtacctggccaagcagctgaaggccatcagcccccagaccgaggagatccggaacgtgctgcaggaggtggagtgccgggacttcctgcccctgcagaccaccaaggacaactccgtgatcccccaccagctgcacgaggccgagctgaagctgatcctgaagaacgccgcccagtacctgcccttcctgaacgagactgacgagacaggcctgaccaagaaggagcagatcctgcaggtgttccgcttccggatcccctactacgtggggccgctgaacgagaagtccaaccggtcctggatcgtgcggagccccgagaagatctacccctggaacttcgagcaggtggtggacatcgggaagtgcgccgagcggttcatcgccatgatgaccgccaagtgcacctacctgggggaggacatcctccccaagaacagcctgctgtacacccggttcagcgtgctgaacgagctgaacaacctgcgcatcaacgggaagaagatctccgtgaagcagaagcagcggatctacatcgacctgttcctgcacgggtacaaggtgagccagaagcggctgaaggactacctgctggccaacgggatcatggagaaggccgacgtgatctccggcatcgacggggacttcaagtccaacctggccccctggcacgcctacgcctggctgctgaaccgggagaacggggtggacatcgccgaggacatcatccggcacatcaccctgttcggggaggaccgcaagctgctggagcggtggctgcgggactactacagcgccgccctgagcgacgaggagcggcgccaggccctgcggcagaagtactccggctggggcaagctgtcccgggagttcctgaccatcatcttccacgtggaccccaacaccggggaggccctgagcatcatcgacgccctgtggaacaccaacgacaacctgatggagctgctgtccgggcggtacaccttcctggaggccgtgaaggagtactgcgaggacaacaccgacatgaagtccgggaccctgcaggactacctggacgagcactacgccgcccccgggatcaagcgggccatccaccagaccgtggccatcgtgggggagatcgagaagatcatgaagtgctcccccacccgcgtgttcgtggagatggcccgggaggacggggagaagggcaagcgcaccgtgacccggaaggccgagctgtccggcctgtacgccaagtgcggcgaggaggccggcgagctgctggagcagctcgaggcccggaccgagggcgagctgcggcgggacaagctgtacctgtactacacccagctgggccgctgcatgtactgcggcgagcccatcgacctgaaccggctggacgtggactacgacatcgaccacatctacccccagtccaagaccaaggacgacagcctgcagaaccgggtgctggtgaagcgggagctgaacgcccgcaagtccgacgagtaccccctgagcccccagacccggaccgcccggcggcccttctgggagatgctgcgcaccaagggcctgatctcccagaccaagttcgagcgcctggtccgggcctccggcttcaccgagaacgagatggagggcttcatcgcccgccagctcgtggagactcggcagagcacgaagatcgtggccgagctcctgcagaaccggtacggcgacaccagcgacgtggtgtacgtgaaggccggcaacgtgtccgtgttccggcaggaccagcggatcggcgccaacggcaagcagaagcaggccggggtgtgcggccacaacgaggtgaccatccaggaccccctgttcgtgaagtgccgggaggtgaacgacttccaccacgccaaggacgcctacctgaacatcgtggtgggcaacgtctaccacgtggtgttcaccaagaaccccctggcctacctgaaggccagggacttcaagtactccctgaaccacatctacgactacgacgtggtgcgggacggggagcgggcctggaccgccggcgccgacggcaccatcgccaccgtgcggcacgtgatggggaagaacaacatcctgtacacccgcatggccaaggaaaccaagggccccctgttcgacctgcagatcgtgggcaagaccaaggggcaggccgccgtgaagtccagcgacccccggatgaccgtggacaagttcgggggctacaacaagcccaccggcacctacttctgcctggtggagcacaccgtgggcaagaagcaggtgcggtcgctggagcccgtgctgctgatgcacaaggccctgtacgagaagaaccccatggactactgcacccagcggctgaacctgaaggacccccggatcctgatcagctgcgtgaagatcgacagcctgatcagcttcgacgggttccggatgcacatcagcagccggagcggcaaccaggtgcggtacaagaacgccaaccagctggtgatcgccagcgagtggcagacctacttcaagaagatctccaagtacctggaccggtgcaagaaggccaagaccgacctgcccgtgaccctgttcgacgggatcaccagcgaggagaacatccggctgtacgagctgctgctggagaagctccgcaccagccggtaccacgtgaagtacgagacagccgccaccaccgtggccgagaaccggggcaagttcaacggcctggccgtgccggagcagtgccgcatcctgatgcaggtgctgaacctgttcgcctgcaacgtggacggggccgacttcaaggccctgggcggcaaggagggcgtggggatcgtgcagaccagcaagaacctgtcctcctacagcggccacagcatcaagctgatccaccagtccgtgaccggggtgttcgagcaggaggtggacctgctggccgaggacctgccc

SEQ ID NO: 113 - DNA, 3318 bp, synthetic construct
  source 1..3318: mol_type = other DNA
atgcccttccgcttcgccttcgacctgggcaccaccagcatcggctgggccgtgtacgagctggaccccgtgacctggaaggagcagaagcggggcaagcccgtgggcctgcgccggctgggggtgcgcatcttcgacgacgggcgcaacccccagtccggcaagtcccacgccgccaaccggcggctgccccgcacgatgcggcggcagcaggaccggcggctggcccggcggaagcggctggagcaggacctggccgactgcggcctcctgcccgaccgcggcgccgaccgggacgccctgttctcctgcgtggaccgcaacgggaagtccagccaccccggccagagctgcccccagagccccgacgccgactgccggaacccctaccggctgcgggcccgggccgccgccggcgaggtgaccctgcacgagctgggccgggtgctgtggcacatcagccggcaccggggcttcaagagcaaccgcaaggccgaccagggcgaggacgacagcgggctgatccggagcgccggcaaggccctggaggcccggctgaagtccgggggccaccccacctacggggcctacctgtggagccggctgcaggccggcgagggcgtgcgggtgcggccccagggcgacggggccgagaagcactacgagttctaccccacccgggacatgctggaggccgagttcgactgcatctgggccgagcagaccaagcaccacccccggctgaccgacgaggaccgggaccggctgcggggcaccatcttcttccagcgggacctgcggccggtggaccccggccggtgcaccttcttccccgagcggccccggctgccccggtggcacccggacgcccaggccttcctgatcctgcagcagctggggcacctgcggatcatccgggagactcgggagagccgcctggaccccgaccggcacgccgtgctgttcgacgccctgtacggcggccggaagatgacctggtccaacgtgcggaacaccctggggctgacgtcccaggacgagctgaacctcgccaacggcggcctgaagcacctgcacttcaacgaggtggccgcggctctggtgggcaccacccggaagcccgggcccctggccgcccggtggcccgagtacgacacggccacccgggaggaggtgctgaagcagctggcccagaccgagtcccccgacgccctgatccgctggctggccggggagctgggcctggacgccggcaccgccgccgccgtggagcggacccagctgcccgacggccacctgcggttctgccgggaggccgtggaggccctggtgaccgagatgcggagcgacgtgatcacctacagcgaggccgtggagcaggccccgctgctggccgccgccgacatccggcacagcgacgcccgccccgacagcggggtggacaacctgcccccgtacaacgagctgccggtgctgcagcggatgctgggcaccggcaccgggaaccccgaggacccccacgacgtgcggctggggcggatcgccaaccccaccgtgcacatcgggctgaaccagttccggcggatcatcaacatgctgaccgccgagtacgggaagcccgatgagatcgtgctggaggccgcccgggacctgtcccggagcccccgggagcgggccgaggtggagaagcggatcaaggccaacgagaagcggaacgacgggtaccgcaagcgcctggaggaggaggacgtgatcggccccggccagcgcgtgggggagctgttcctgaagatgcggctgtgggaggagctgggccggaacgaggccgaccggcgcagccccttcaccggccggcccatcagcctggccgacctccactccgaggtggagatcgagcacatcctgcccttcggggacacgctggacgactcccccgccaacaagaccctggccttccgggaggagaaccggcggaagggcaagctgagccccggcgaggccgccgcccggggcatcttcgaccagcagaccatcatcgacctgaccaagcacctgccccggaacaaggcctggcggttcctgcccgacgccatggaggtgtacgaggagcagaagtccttcgaggcccggcagctgcacgccaccgggtacctggcccgggtggtgcgggcctacgccgaggccctgttcgacaagcgggaccccgacggggtgaaccgcacccacgtctggatgctgcccgggcggatgaccgccctgctgcggcaccgctggggcctgaacctgggcgaccacaaccgcaaggatcggaacgaccaccggcaccacgccatcgacgccgccgtggtgggggtgatcgaccggcggatgatcgccggcctgcagcgggccgcccgcgcccacggcgccatgatgctggagcgggtgctgcccgacccgcccgaccccttcccggggttccgggacgccgtgcacgccgcggcccgcgaggtgcgggtgagccaccggccccggcacctgaccgccagcgccgacggccccagccgcacctccgggcggctgcacgaggccaccgcctacggcctggtgcgggacgtgcccgagaaccaggccgaccgcaccatcggcaacgtggtggtgcggaagcaggccaccgccctgagccggaaggagatcggccaggtgcgggacgtgaagctgcggcgggacctgctggaggccaccgagcccgcccgggccgccggcctgaaggagtccgaggccgagaagctgcgggcggagctgctggccgactggtcccgcaagaccggccaccggcggctccgcatcctgaaggccgagaaccccgtgcgggccgtgcacgactgcgccgggcgggcctacaagtacttcgcccccggcgaggtggcctgcgtggacatcatcgacgtggacggggtgtggaaggcccaccccctgtccgtgtgggacgccaacagcgggcaggggcgggcctggaacgacgcctacccctccggcaggttcgtgatgcgggtgcacaagaacgacaccctgcagctgttcgactgggacgacgaggaggaggaggtggtgccggggtccaactccatcaagcgggtggtgcgcctggagcccagcaacaagcggctgcggctgtgcgacctgaaggaggccggcaccctgcagaagcggcacaaggacgaggacgacgacttccgctgggacctggcctccatcagcaagctgaagctgcggcgcgcccggcgggtgcggatcgacgagctgggccgggtgcgcatcatcccccacgggatggcc

SEQ ID NO: 114 - DNA, 3534 bp, synthetic construct
  source 1..3534: mol_type = other DNA
atgtccaagaagaagtccagccggtaccaccagcaggccgagcagatccggaaccggctgaacaaccggccctacaccatcgggctggacatgggcgtggggtccatcggcctggccgtgatcgccctggaggagatcggcggccggctgaccagcaccgaccccatcttcaccaccagccggatcttcaccccctccaccggggcctccgagcggagggggaagcgcggccagcggaacagcatccgccacaagagcaaccggctgcgcttcctgtggaagctgctggccagccagaacctgatgctgcccctgagcagcgaggccgtggccgaccccgccaccctgcggttcgacgacgaaacccgcaagaaggacccctacaccctgcggctgaaggggctgagcgagcagctgagcctgcccgagctgggctacagcctgtaccacatcgccaaccaccggggcgccagcagcatccgcaccttcctggacgacgagaagtcccccgacgacgagaagctggacgagcagatccgggaaaccgagaagctggccaaggagaaggggctgggcaccttcatcgaggtgctggccgccttcaacgagaacaagctgatcgggtaccgcaacatcgacaagctgaaggccagcaaggtgcccgtgcccacccgggacatcatcgagaacgagatcaccaccctgctggagaaccagtccaccttctaccccgagactctgtccaccgagttccagaagaagatcctggacgccatcctgtacgagaacgagaagatcgtgcccgaggccggcaactgcccctactaccccgacgagaagaagctgcccaagtgccacttcctgaacgaggagcggcgcatctgggaggccatcaacaacgcccgggtgatcatccccgagcagcaggccaaggggttcatcaagatgatccccacccccttcaccgaggacgagcggaaggacctgttcgtgttcctgcgggaggggaaggacctgacccccaccgccgtgaagcggatgttcgagcagtacaagaactgggacatgaccctgcaggggcgggacgccaagaagcagaagatcaagggcttccgcttcaaggacctggaggagcggcccttctggaagtccttcagcgaggaccagcaggaccagttcctctacgcctgggtgaacacccccgacgacaagaagctgaagtgcctgctgatcgacaccttccacctgtccaacgacgtggccaccgacgccctcaagacggtggagctgatcggggactacgccccgatcggcaagaccgccaccaagctgatcctgaagtacctggaggacggggcctcctacacggaggccatcgagaagggggtggaggccggggagctggacgaggtcggccagtgggaggtgcaggagaagctgccctactacggcaagatcctgaccggctccacccaggccatcatgggcaagtactggcactccgccttcaaggagaagcgggacctggccggcttccacaagcccaagacctactgggaggaggagtgctacgggcggatcgccaaccccgtggtgcaccagtccctgaacgagctgcggaagctgctcaacgaggtgatcgacatcctgggcgacaagcccgccgagctggtggtggagctggggcgggagctgaagatcgggtccgagatgcggaacaagatctccatggaccagaacaagcgggagaaggagtccgagcggctgtacgccaagtactgcctgcccaacaacctgggcaagcggtacatccagcacttccgcctgctgaccgagcagaagttcatctgcccctactgcctcaagaccatctccatcgcggaggtggccgggggcaccgccgacatcgaccacatcttcccccggcgggagactgccgacgacagcctggccaacaaggtggtgtcccacggctcctgcaacaaggagaagggcaagcggacccccttcgccgccttcagctcccgggacaactggtcccagatcatgcactacatggccaccaaccccgacatgtacgccaagcggaagaagttcgagaaggacgaggaggagtaccagaagtacctggagtcccggggcttcgtgagccggttcaagaccgacaacagctacatcgccaaggccgtggtggagtacctgcggtgcctgttccccaccaacgacctgaactccgtgcggtccctgaacggccgggagacaagcatcctgcgcaagtcctgggacctgcagaagatcagctcggagctgggggccctgcacatcctgaagaacaaggatgagaacgagctgggccggaaggaccgcaccgacaaccggcaccacgccctggacgccctggtggccgggtactgcagccggtccctgatcaagaagatcaacgacctgagcagcaagggcatccccgccgaggagatcgagcgggccctgcccgtgcccggcttccccgagacaaccatcgagacagccaacaaccagaaggacgtgttcagcaagaagatcaaggccttcctggagctgaacggcttcatcagcctgaagatcgacaccgccgtgaacggccccctgctgaaggacaccatctacagcatcctgggggccaacgagcacggcgaggagctgatcttcgtggtgaagaagtccgtcagcaccatctccgtgaaggagggctccctggaggaggtggtgaaggccatccacgggcggttctccgccaaccaccccaagtggtacagcgacgagctcaagaccaagatcgagggcatccaggaccacaaccagaaaaccatcacccggtaccaggagagcctgcagaaggctcagcagatcctggaggccaacaacgagaagaacaaggaggagggcaagaagcccctggagctgtccgcccggaacatctccaagaaggccctggagctgtgcgggggcacctactacctgctgagcaacaacacccggcagaaaaccttcgtggccaaggagcccaccaagcagaccaagggcttcgcctacgacaccgggtccaacctgtgcctggacctgtaccacaacaaggagggggtgctgcgcggggagatcatccggaacatccaggccatgaacaagaacttcatccccaagtacaagcaggccggcttcagcctgtacgagcggatctaccagggcgacgtgctggagatcgagggcaccagccccgtggagctgacggagaagtcctccggcagcgacaaggtggcctccgtgcggacccccaacgccctgtccaaccgcaccttcgtgtccgtggtgaccttcaccgagacagtgagcggcatccaggccttcttcagcaacatctgcaagagccgggccgacaaggacgcctccttcagcctgggcagcctgatcaagctgaacgcccggaaggtggtgctgagccccgccgggctggtggcctacgtgagccgccccctgctggacatccccaaggaggag

SEQ ID NO: 115 - DNA, 3204 bp, synthetic construct
  source 1..3204: mol_type = other DNA
atgggccggtccaagaacggggccatgcagcggtaccggctgggcctggacctgggcaccaactccatcggctgggccgccgtgaccctggacgacgacggccagccctgcggggtgctggacatgggcgtgcgcatcttccccgacgggcgcaaccccaccgacaagaccagcaacgccgccacccggcgggtggcccgcggggcccgccggcggcgggaccggtacgtgcagcggcgcagcaacctgctgaaggccctgatcacgtacgacctgatgcccaccgactacaaccagcggcggcagctggccacccgcgacccctacaccctgcgggccaaggccctggaccaccccctgccgccccacgagctggggcgggccctgttccacctggaccagcggcgggggttccagagcaaccgcaagaccaccggcgacgacgacgacgccgccaagcagatcgggcccaagatcgagggcctgaacaagagcatggccgccagcggggcccggaccctgggcgagttcctggcccgccagctggagcagggctacgccgcccggttccgggagggggccgagttctaccccgagcgggccatgtacaaggccgagttcgccgccatccgggccgcccaggagcggcaccaggccctgagcgccgcccagtgggacaccctgcacgagatcatcttctaccagcgggacctgaagtccgtggagcccggctggtgccggttcgagcaccaggagaagcgggccgccaaggccctgcccgtgttccaggagttcaggatgctgcacgagatcggcaacctgaagctgcacgtgggcagcgagcccgagcggcccctgaacgacggggagcgcgagcgggccctggagcggctgcgggccggcaaggacatcaacctgaagaagcccgtgaaggccctgggcctgcccgccggcgccaccttcaacctggggcgcggcggggtgcggaccatcatcaagggggacgaggccaccgcccggctggtggagcagcggaagaagggccagcccacccagaccctgttcgggaagcggtggctgaccctgtccctggacgagcgcaacgagatcgtgcgctccctgctggacaccgaggaccccgccgtggtgcggcgcaaggcccgggagaactggggcctgaccgacgcccaggcccaggccgtgtccgccgtggtgctgcccagcggctacggcgagctgagcgagaaggccatcaagaagctgctgccccacctggagcggggcctgcgctacagcgacgccgtgaccgccgctgactacctgcaccacagcgacttccggaacgccgaggcccacgagcggctgccctactacggcgccgtgctggagcgggacgccgtgggggccgaccccaccaaggacccccagcgcgacggcgaggtggcccggtacggccgcatcggcaaccccaccgtgcacatcggcctggggcagctgcggcggatcatcaacaagctgatcgccgtgtacggcaagcccgaggagatcgtggtggagctgggccgggacctgaaggccaacaaggacgaccgggactggtaccggcggcagcagcgcgagggcaaggcccggaacgagaagtacaaggagtggttcggcggggtggagccccgcccccacacccggctgaagctgcggctgtgggaggagcagggggagagccaggcccggttctgcccctacaccgggaagcggctgagcttcgagatggtgatctccgaccagacggagatcgaccacatcctgcccttcagccagaccctgcacgacagcctggccaacaaggtggtgtgcctggccaccgccaaccggtacaaggggaaccagtccccctacgacgccttctcccacaacccgcccgggtacgagtaccaggccatcctggcccgggccgccaagctgcccgacaagaagcggtggcgcttccagcccgacgccatgcagcagttcggcgggaagcgcgacttcctggagcggcagctgaacgaaacccggtacctgtcccggaccgcccgggactacctggcctacctgtacgacgagcagaccgagcgccggcgccgggtgcgggccgtgcccgggcacatgacggccctgctgcggcggggctggggcctggagggcatgctgcgggagagcaaggacggcgagccctcccgcaagcagcgggacgaccaccggcaccacgccatcgacgccttcgtggtggcctgcaccgaccagggcctgctgcagcggttcgccgaggccagcaacagccggcacgaccgcgccgcccggctgcccgccgtggccggcgaggccccgccctgggaggggttcggccggtccgccctgcgccccttcctggaccggctggtggtgagctacaagagcgccgccggcgcccacagcgaccagaccaccgggcagctgcacaacgagactgcctacggcctgctggagcccgccggcgccggccccagcaaggtggtcacccggaagcagctgtccgccgtgaagcggaaggacctggaggctatggtgcccggccagcccctgcaggccgccctgctggccctgtgggaccaggtggccgccgagggcaagaagcccgccgacttcgccgagcgggccgccaacaagggcgtgctggtgaagggccagcgccagcgggtgcggcgggtgcgggtggtggacaagcagaccgtgatccccatcaaggaccaccgcaccggcaagccctacaagggctaccgcgccggcggcaacgagttcgccgacatctggcagctgctggacaagaccgagacttggaagctggtggccgtccccaccttcgacgccaaccagcccaagttcgacctggacaagtaccggccccaccccgccgccaagcggctgatccggctgcggatcgacgacatgggggccctgggggaggggccggagcgccggatcgtgcgggtgcggaagatcaccaacgcccagaccggggtgctggtgttcctggacgaccacaacgaggccaacgtgcccgaccgggtgcgcaagaaggagatgaagtccaacccctacagcgcccggcagctgaagcagcagggcttccggaaggtccgggtggacgagctggggcgcgtgcgcgaccccggcccccgcgccccc

SEQ ID NO: 116 - DNA, 4599 bp, synthetic construct
  source 1..4599: mol_type = other DNA
atggccaagatcctgggcctggacctggggaccaactccatcggctgggccgtgatcaacgtgatcatcgaggacggcaaggtggtgaagtacatcagcatcgacgacaccggggtgctgatcttccccgagggggtggagcccaccaccatcgggaagggcgacaaggagcagtccaagaacagcacccggcgggagcaccgccagaaccggcggcaggtgtaccgcaagaaggtgcgcaagttcaagctcctgcagagcctgatcggcctgaacatgtgccccctgtccatcgacagcctgaaccagtggggcaagtggaaaaagaccgaaaagacggaggggaagaagttcccctccgagcccgagttcatcaagtggctgaagctcaacccctacgagctgcgctaccgggggctgagcgaggacctgagcctgctggagctgggccgggtgttctaccacttcatgcagcaccggggcttcctgtcctcccggaagggcggcgacgagggcgccatctacaagggcaaggacaacatgaccgggatcaacgacacccggaacctgatcgggaccgacaccctgggcaagaagctgtacgagatcctgcccaaggagggcgaggagttccactacaagaccgacgccaacggcaacgagctgcgggtgcggtcccgctacaccgagcggggcatgtacatcgaggagttcctgaagatctgggagcggcagaccgcccacctgggcctggacaacatgctgatcaagtccagcaaggtgcggttcctgaagggcaacctggagtccaacaggaaccgcaagaagatcaacaactacttcgacaagtacggcaaggagaacgtggagatcgccggcgggaaggtgaccacctacaaggagatcctgctcaagaccttcctcgccggcgagatcgagtccgggatcgacgggatcaagttcaagtccaacgagtccctgctgttctggcagctgcccctgcggtcccagaagaacctgctggacaactgcaggttcgagcagaaccggcccgtgctgatggggaacggggacttccgccggaagaacggcgagatcgtgtaccggtccaagaagccctgccccctgtcccaccccgagttcgagctgttccgctcctaccagatcatcaacaacatcaagtacggcaagggggagcggctgaccgacgaccagcgcaagctggtgctggacgtgttcagcaccaaggacaactccttcaagttcgagcagatcgtgaaggccctgaagctgacctacgaggagttcaactacgacctcgaccagaagatcagcgggaaccccaccatcaagaagctgaagcccctgttccccgaggaggtgtggaaccggtgctacgagaagatctggcactgcttctacttctacgacgacaacgtgcggctgctgaagaagctgaaggaggactaccagctgaagaacagcttcgacatcgagaagatcaagaagatccggatcgccgagggctacagcaacgtgagcctgaaggccatccggaacatcaaccccttcctggccaaggggttcaccttcagcgaggccgtggtgctgggcggcatcaagaacgccttcggcccccggtgggagttcttcaacatccccgacatcatcgggggcctggagagcgacgtgctgcggatcctgcacgagaaggggaacaaggagggggaggccatcaacaagatcaaggactacctgtccgaccccctgaacaactacggcttcagcgagaacgacccggccttcacccagctgtaccaccacagccaggagatcgagaaccgcgacatcgaggactgggtgcccgagctggagaacctgcggaaccccatcgtgcagcaggccctgtacgagatgcggcggctggtcaacgagctgctgcggaagtacaggaagcaggaccccgggttcatcttcagccggatccacgtggagatgggccggaacctgaagaacaccaagtccaagcgccaggagatctccgtgaaggccaacgagaacaccaacaagaacgagaacgcccggcagcggctggccgagctgggccagcggcccagccgggacaacctcctgcgctacctgctgtacgatgagatccagaagcacagctccggccccgtgctgtgcccctacaccgggaaggtgatctccgtggccgacctgctggacggcaccaacgccgtccagatcgagcacatcatccccaagtccatcagcctggacgacagcttcagcaacaagaccctgtgcgagagcaagttcaacaacctgaagggggagaaaacccccttcgagttctacctgatcaaccacgactacaagctgtgggggatccagaagcacgacaacatcaaggacggctggaacgagatcaccgagcgggtgtacaagatcctgccctacgccaaggcccgcaagttctccagcaagaacgagttcaaggtggacgacttcatcgagcggcagctgaacgacagccggtacatcagccggaaggccgtggagctgctgagcagcatctgcagcgacgtgcggatgctgcccgggcaggtgaccgccgagctgcggcacctgtggggcatcaacaacatcctgaaccccgtgtgcgggatgcaggactgcgaggtggaggtgaaggccgggaagcggctggcctactacgtgctcaccgacgagcaccgcaaggtgaagtccatgctgcgcaagaccaacgaccggcccaccaccaacagcaaccagctggtgctgtccgggatcctgaacaagaacgtgctgagcagcaagtacctgtccctgaagatcaacgtgcccaacatgatcgacgggaagtactgggtgctcgtgaacgtgagcgacaagaccagcctgttcccggtgttcgccaagaagcccgtgtccgacctggaccacctggtgctgaagggccgggtggagaagggcttcttcaagaacgacaccatcgggaacaacatcaaggtgaaggaggaccgggacggggcctactgggcccgcttcagcgtgaagaagttcgagctgaagatcgccgagaacaagggcaaggtcaagaccaagacctccgaggtcgccctgttcggcgaggtgaagaacggcctgttcgtctgccacatctaccagtgcaagacgaacctgcccgacggcaagtactgggccttcatgcagctcgacttcgaggggttcgagctgatgcgggtgaagaacatcaagcccgagactaaccagaaccagatcctgggctacgtgaccgtggacgagaacgagaatatggtggccgacatcgaccccgcctacagcaagcggaccgagcagaaccccggccgctactactgcgtgttcaacatcgagagcatcgagcaggacctgtaccccatggagaacgaccctcccaagcccaagaagggcgaggtcctgaccgaggccgtggtgtgggtcgatgaggccaccggggagatccgctacgaccccaagaagaaccgggaggaccaccggcaccacgccatcgacgccatcaccgtggccctgaccgagcagggcttcatgcagcggctgtccacctactacgccaaggaggagaacaagaaccgctccctggacaacagcgagaagttccccatgccctgggacggcttcgagaaggacgtgaagaagttcgccgagtccatcctgatcagccacaagcagaacaacaaggtgctgacccgcatcagcaagaagatcgagaagaacggggtgatctacaagtccgtgggcttcagcgcccgcgggcagctgcacaaggacaccgtgtacggcaagcggaccccgcccggccacaaggaggcctaccacgtgcggaagcccatcacctccctggaggacaagaagcagatcgggaaggtggtggacggggtgatccggaacctgatcctggagcacctgcgggacaactgcggcgtggacatctccaacgacagcttcaaggtgcccaaggacgccttcttcaagaacggcaagccccggctgttcctgcccaaccgcaagggcggggagccggtgcccgtgaagaaggtgcgggtgcgggagaacttcgggaacgcccacaacctgaagtcctccgtgaaccagtacgtggacctgaagaacaaccaccacgccctgatctacctgaagtacgacgggaagctgggcgaggcgatggtgtcctactgggaggccgtcgagcgccagaagcagggcgccgaggtgttccggctgcccgccgacgggaaggagtccatcgccatcctgcagaccaacgacatgttcctgctgggcctgagcaacgaggagttcgagaacaacaagaacaaccccgccttcctgtccaagtacctgtaccgggtgcagaacatctccagcaaggactacctgttccggcaccacctggcctccatcgtgaccaacaagaacgaccagtacaggatccagagcttcaaggccttccagaaggccaaccccatcaaggtgctgatcgacaagctggggagcatcgacagcatcgag

SEQ ID NO: 117 - DNA, 2967 bp, synthetic construct
  source 1..2967: mol_type = other DNA
atgagcgacatcaccctggggctcgacctgggccccaacagcatcggctgggccctggtggacgagtcccgggagaagctgatcgccagcggcgtgcgggtgttccccgaggacgtgaaccacgagcccaacgaggccgacgagacaaagaccaagcaccggcgcgacaagcggctggcccggcggcagaccacccgccgggccagccgcaagaagcacctgaagaagctgctgtgcggcgccggcctgctgcccgtgaaggacaccgacctgcacgccctgctggagaacgacccctacgacctccggcggaaggccctgtacgagcgcctgcagccgtaccagatcggccggctgctgtaccacatgaaccagcggcgcgggttcaagtccaacagcaaggccgatcgggcccgcaagaaggagacttccaagatgctggaggagatctccgacctgcaggagaagatcggcagcgccggctgccgcaccctcggggagtacctggccgcccgccggctggacccccacgagcgggtgcgcggcaagcacacccgccgggagatgtacgaggaggagttcgacgccatctggaacgcccagcagaagtaccacaaggggctgctgacccccgagctccgccagaagatcgccggcacgatcttcttccagcgggacatgtactggcgcaccgccaccatcgggcggtgcgagctggagcccggccagcggcggtgcccccgcgccgaccgccacgcccagcggttccggatgctgcaggagatcaacaacctgcggctgctggacaccagcaccggcgaggagcgccggctgaccgaggccgagcgcaccgagctgatcaagtacctgtccacccagaaaacccggaccttcaaggacatcaagaagaagctggggctgttcgacacctgctccttcaacctggagcgggccgagtgctccagcctgaaggggctggagactgacgccatgctggccaacaagaacatcttcgggaaggactggtggcggctggacgacggcctgaaggacgagatcgtcgccgccctcatcgacgagaagtccgagtacgacgacgagtccctgctggagatcgcccagcagaagtggaagctcagcctggaggccgccgagcggctgctggacatcaacctgcccagcgggtacatgaacttcagccgcaaggccatcgaccggctgctgccccacctggagaacggcctggtgctgatgtccaacgacgagacacccagcgccctgcgggaggccgggtacctgcggcccgaccagcgggccatcaagtcctaccgcttcctgccccagcccccggacctgcccaaccccatcgtgcggcaggccctgcacgaggtgcggggcgtggtgaacgccatcctgcgcgagtacgggaagcccgaccgcatccacatcgagctggcgcgggaggccaagggcagcttcgaggaccggcggcagatcctgatcaagaacaaggagcgggagaagaagcgggacgaggcccgcaagtccatcgaggagcacggccgcaaggccacccgcgacaccatcgacagctacctgctgtggaaggagcagaaggaaacctgcatctacagcgggaagccgatcagcatctcccagctgctgggcggggaggtggacgtggaccacatcctgccctacagccgcagcctggacaacagcctgatgaacaaggtgatctgcttccgggccgccaacgccgacaagggggaccgcaccccctacgagtggctggccgagagcgaccccgacgcctacgagaagatgctgcagcggtcccggaacctgccctacgggacctacaacaagcagcggaagttcctgcagaagaacgtggagctggacgacttcatcaaccgccagctgaccgacaccgcctacatcagccgggaggtggtgtcctacgtgaagtgcctggacgtgaaggacgtcctgtgcacccggggcaaccacaccgccaacctgcggcggctgtggggcctgaactgcatcctgaaccccaactgggaggacttcaagaaccgggacgaccaccggcaccacgccgtggacgccatcgtggtcgccctgaccaaccggtcccggctgcaggtgctggcccggacccacgggcacgacatggagcccccgtggggcagcttccgggccgacgtggagcaggccatcaacgccatcaacgtcagccaccgggtgcagcggaagatccgcggcgccctccacaaggagacaatctacggccccaccaacgagaacggcaagttcacctaccgcaaggagctggagaacctgaccctctcgatggtggacgagatccgggacaagaccatccggggcctggtgatcgagcggctgaagaagcacgggatcgagcccggccgggggagcggcagctccatcccggccgccgtgtggaaggagcccttcctgatgccctccggggtgcccgtgaagaaggtgcgcctcgtcaagaccgacgagacaatccagcccatccgcaacggcaccgcctacgtgaagcccggctccctgcaccacctgtgcctcttcaagcagatcaacgagaagggcaagctggtgctggacgccgtgttcatcaccaccctggaggccgcccagcgcgccaagcggggcgagcccatcatccagaaaacccacccccagaaccccaccgcccagttcgtgatgtcgctcagcatgaacgagatgctgatcctggagcacaagggcaaggaggagctgtgccgcttcatcagcgccgccagcacctccaagcagatgtggttcaggatccacaccttcgccgggaagtccgccgaccggcgggggcagatctccaagaagcccaacaccctgaaggcccggaaggtgaccgtggaccggctgggccggatccgctgggccaacgac

SEQ ID NO: 118 - DNA, 3279 bp, synthetic construct
  source 1..3279: mol_type = other DNA
atgtccatcagcttcagcttcgacatcggccacagcagcatcggctgggccgccctgaaggtggacagcaccgagcccgaggtgctgggctgcggggtggtggccttccagcccaaggactgccagaaccagaagcgggccggcttccgccggcagcggcggcacatcgccgccacccgcaaccgcatcaagcgcctcgaggccttcctgcagaaggccggcgtgctgtccgccgccgacgtgacctactgccgggagaacccccacccctggccctggctgctggccgcgcaggtgctgcgcggcgagcggaagctggaggagcgggagctgtgggccatcatcaggtggtacgcccacaaccgggggtacgacgggaacgccctgtgggccggcgaggacgccgacaaggacgacatcaagaaggtgaaggccgcccgcgacctgatggaggagcacaagaccaacacgatgtgcgagacagtgtgcgtgttcctggacgccgaccccaccagcaccgccaaccccaacctgaagaagtacttcaagggcgagaacgtggccttcccccggtccaccgtgatcgccgagatgcgcaagatcctcaagacccacgtcggcgagctggccaacatcaccgagcccttcatcaaggccctgctggacgactggaagtgcagcaaggtggccgggttcgacgccaagctgccccagcggtacttcgggggcctgctgttcggccagctgaagccccggttcgagaaccgcatcatccccaagtgccggctgaccggggaaaagacccccagcaagcactcccgggagttctaccggtaccgctgggccatgttcatgaacaacctgcgcgtggccagcgaccaggggctgcccccgcggcccctgcgggtggccgagcggtgcgccctggacaagatcatgcacgagaaggggtacctgatcaagtccgacctgaccaaggccctgaagaagtccctgaagctggagcccgtgaacctggaggccatgctcctggtgcccgagatggagaacgccctgaccctggaccccgccctgcgggaggtgtccgggaacaagcacctgaagaaggtgtggcccctggtgcccgacgagcggaagcgggtgttcctgaaccagctgttccacagccggaacttccgggggaagcccccgtccatcggccagtggaagatccggctggccgaggacggggccgccatcgagaagttcgacgaggtgttccccgagatcttcgaggccgagagcgagaagctggccaagaagaacctgaccctgacccagcaggagttcctggaccggcccatccacctgagcaagcgggcctccgggcgggccccctacacccggaagaagctgctggacgccgtggcctgcgtgatgcgggacgaggacccccgcagccacggcgggcccctggaggagactgaggaggcccggtcccggcagcagaacgagtccatcgaccgcaacagcaacaaccacctggtgcggcaccggctgaagatcttcacccggaccctggacgacctggtgaagcggtacgccaacgacgaccccgccagcgtcgcctgggtgggggtggaggtcatccgggacctggtgcagttcagcggcaagaccgagaaggagaaggccaagatcctgagcgaccagctgagccaccaccgcaagatcgtgaagatcctggaggagaagcgcgagagcaccggcggcaactgggagatcaacatcggcctgatccacaaggtccggatcgccgacgacatgggctggaagtgcccctacaccgggaacgactacaacctgaacaacatcatccacggcaaggtggagctggaccacatcatcccctacagcaagcggcccaccaacgccctgcacgccctgaccctgaccttccccgaggtcaaccggcagaagggggcccgcaccgccctcgagtacatcgaggacccccagaacgagcccccgcacagccccaaccagttcaagaagttcgtggagaacctgaagaagaagaacgggccctccaaggacgacgagatgcggtgccggaagcggaagatcgccctgctgacgccccactacgagaagtacggcaagggcgccggcaccaacgaggctgacgagggcgaggtggtggacgggttcaccgagggctccctgagccagaccagctacctgaacaagctggcggtgcaggagacaagccggtggttcaccgagtgcctgggcagcgaggtgaacagcccgcccgtggtgcagctgcccggcagcgtgaccgccgccacccggcggaagtggaagctgttcgggcagctgaacgaggtgtgccccgagactcggaacaaggccaaggccgacgtgcggaagatcacccacctgcaccacgccatcgacgccatcgccatcgggctggccgtccactacttccccaaggaggacggccggctgcacaccctgctgtccaggcgctccatccggaaccccgacgaccaggcctacctgaagaagaagctgggcgacctgatctgcttctgcaacaacgggtgctgggagctgcgggacctcagcccctgcgtgaaggagcagatcagcgagcgcctgctggagaagaaggtggtgcggcacatcccgcggacgatgcggggcctgcgggtgcaggagaacatctggggcgtcgagggggaggaccccgacgacgacaccaagctgcggatctccatgaagtcccgcggcgaggacgggaagaagtccaagtccaagaacaagtccgagcgcaagaccaagctgctgggctaccggcccaacgaggcctccgagggcaagctgaagcagctgaagggcgtgctgatcgtggagtacaacttcggcgtggccctggaccccgagcccaaggtgatctcctaccagcaggtctggaagcagatctccgagctgaaggaggccaacaagggccgccccgtgcggatcatccgcaacggggacatcatccgcatcccgcggggccagcgctacaagggcgtctggcgggtgcactccgtgaaggacaaggccatcggccccgtgctgaacctggccagccccgagttcgtgaacctggagcggaccctgaagatggaccgggagcgcgagtccgaggacgggaacaacccccgggccaaggaggacgtgcggctgcgcaccctcctgaaggacggcctggagatcctgaactgcgactacgccgggcacgtgcgg

SEQ ID NO: 119 - DNA, 3267 bp, synthetic construct
  source 1..3267: mol_type = other DNA
atgaacaccgaggtggagtcctccaccctgtaccggctgggcctggacgtggggaccaactccatcggctgggccgccatcagcctggacggggacgggaagccctgcggcatcctggacatgggggtgcggatcttccccgacggccgcaaccccaccgacaagaccagcaacgccgtgaaccggcggctggcccggggccagcggcggcgccgggaccgctacctgaagcggcggggcaagctgatcaagaccctgatcgagtttggcctgatgcccgccggcaaggaggagcggggcagcctggccaagtccgacccctacaagcggcgggccggggccctggaccgggaccggcccctgggccccttcgagctgggccgggccctgttccacctgaaccagcggcggggcttcaagtccaaccgcaaggctggcggcgacgacgagtccgaggcccagaccacccgggccgagatcgacgccctgcggaagtccatccgggagtccgaggcccggaccctgggcgagttcctggccgagcggcacgagaagggcaagaagggcgagaaggacggcaccgtgcgggcccggccggggcacgagctgtaccccgaccgggccctgtacgaggccgagttcgacgccatccgctgcgcccagaagccccaccaccccaacctgtccgacagccagtgggacaggctgaaggacatcatcttcttccagcggcccctgaagcccgtggaccccgggtggtgcctgttcgagcgcggcgagaagcgggccgccaaggccctgcccatcgcccaggagttccggatgctgcaggaggtgaacaacctgaagatcgtggtgggcttcgagcccgagcggcccctcaacgacgaggagcgcgctcgggccctggagcggctgcgggccgggaaccccatcaacctggagaagcccacccagaacctgcggctgccggtgggcgccaccttcaacctgtccatcggcggccgcaagtcggtgaagggggacgagacatccgcccggctggtgaccgccaagaaggagaagggcgagcggaaggccaaggacatcttcggctcccgctggcacgccctgagcctggacgagcggaacgagatcgccgggttcctcatcgacaccgaggagcccgaggccgtgcggcagaaggcccgggaggactggggcctgaacgacgcccaggccaaggccctgagcgagatcagcctgccggacgggtacgccaacctgtccgagaaggccatgcggaagctgctgccgcacctggagtccggcctggtgtactccgaggccgtgaaggccgccgggtacagccaccactccgacttccgggagggcgaggcccaggactccctgccctactacggggaggtcctggagcgcgacgccgtgggggccgaccccaccaaggaccccgagaaggacggggaggtggcccgctacggccggatcgccaaccccaccgtgcacatcggcctggggcagatccggcgcgtggtgaaccggctgatcgaggtgtacggcaagcccgaggagatcgtggtggagctggcccgggagctgaagctcaaccgggaccagatccgcgagctcgagcgccggaaccgcgagggcggcgagcgcaacgagcggttccgggagatgctcgagagcgccgagcagggcctgtccgccgacaccctgcagcggctgcggctgtgggaggagcagggccccgagcacgcccggctgtgcccctacaccgggaagcccatctccttcgagatggcggtcagcagccggaccgaggtggaccacatcctgcccttcagcaagacgctggacaacagcatctccaacaaggtgctgtgcctggccgggaccaaccgcaccaagggcgaccggtccccctacgaggccttcgggcacaacccgcccgggtacgactaccaggagatcctggcctggtccgacaagctgcccgacaacaagaagtggcgcttcaaggaggacgccatggagcggttcgacgacgagtccgccttcctggaccggcagctgaacgagactaagtacctgagccggaccgcccggacctacctgagccacctgtacgacgagaaaacctccgggcggcagcgggtccgggtgatccccgggcggatgaccgccctgctgcggcggggctggggcatcgaggggatgctgcgggagtccgagaacggggagccccctcggaagtcccgcgacgaccaccggcaccacgccatcgatgccctggtggtggccaacaccacccagggcctgctgcagcagttcgcctcggcctccgcctccgccgacagcgccgacgccaccgagcggctggcgtcgatggtgcccctgccctgggacggcttccaccgcaacgaggtgcagccgttcctggacaggatggtggtcagctacaagcaggaccacggcacccggggcgggctgtccaccaccgggcagctgcacaacgccaccgcctacgggctgatcgagcccctggaggacggcagctacaaggtggtgatccggaagaacctggacaagctgaagaagaaggacctggagagcgacgccatccgggaccccctgctgcggaaggccctgctgcggctgtgggaggaggtggagagcctggaggggaaggccaaccccgccaagttcgccgagcgggcgaacaccaagggcgtgctgatcgccggcaagcggcagcgcgtccggcgggtgcgggtggtggacaagcagcgggtgatccccatcaagaacgagtccggcaagacctacaaggggtacctgcccggcgggaacgagttcgccgaggtctggcggatgctggacggcaagtggaaaaccgtggtggtgcccgccttcgaggccaaccagcccggcttcgaccccaccaagttccgcccccaccccgccgccaagaagctgatgcggctgcagatcgacgacatgggggccctggggaagggcgagagccggcggatcgtgcgggtgcgcaagatcgacgccggctccggcgggcgcgtggtcatggacgaccacaacgaggccaacgtgcccgaccgcatcaagcaggacatgcggatgcggcgggagactggcgtggacaccggcatgaaggaggaggtgttcagcgcccagaagctgcggcggctgggcttccggaagatcggggtggacgagatcggccgggtgcgggaccccggccccctcaag

SEQ ID NO: 120 - DNA, 3180 bp, synthetic construct
  source 1..3180: mol_type = other DNA
atgaagaacaccctgggcatcgacgtgggcaccaactccgtgggctgggccctgatcaacgagaacgggatcatcgacaccggggtgcggatcttcagcgagggcgtgaaccgcgtgaagggcgtggaggagtcccgcaacgtgaagcggcgggaggcccgcggcatccgccgcaagctgttccgctacaagctgcggcgggagctgctcatgcgcaagctggacgatctgaacatgtaccccgagcacttcaccgagactcccgccgagctgtacgagctgcgggccaaggggctggacgagcggatcaccctgttccagctggggcgcatcctgctgctgctgaacaagcggcggggcttcaagtccaaccgcaagtccgagcagagcgaggaggccaagtccaagtccgactactacaaggagctggacgagctgaacgagaagatcaagctgttcggctgccggaccgtgggggagtacttctacaccctgttcaagcaggggtcccagctgaacgacaacacctacgaggccaacgagcggatccgggcccggttcgtgtaccgggacaactacatcaccgagttcgacctgatctgggacaagcaggccgagttctacccggacacgctcaccgagaagaacaagatcgagatccgcgacaacatcatcttctacgcccggcccctgaagtcccagaagcacctggtggccaagtgccgcttcgagcccaagaagcgggtggcccccaagagcagcccccagttccaggagttccggatctggcacaccatcaacagcatccgggtggacgacaagaaggagatccacaggaagctggagcagagcgagaagctcaagctggccaacttcctgatggtgaactccgacatcagccacgccaagatcaagaagatcctgagcctggagtccagcgccagcctgaacgacctgccgcccaagatcaagggcaacaccacctacagcaagatcatgcaggtggtgggcaccgacaagttcaacagcctgtccgaccgggagctgttcctgatctgggagaagctgtactacgcccacgacagcgagtggctggtgaacaacctgcaggccaagcacggcctgcccctggacgtggccaagaagctggccaacgtggccctggagcaggactacggcaacctgtccaccaaggccatcgggaagatcctgaagcacctgaagcagggcaaggagtacaacaaggcctgcgaggaggaggggtaccggcactccgactacttcctggagggggaggagcgccctcccctgaccgagaagatcctggtgtccaacaacgacccggtgctgagccagatcatgagccccctggtgaagcgctcggtgaccgagtgcatcaaggtgatcaacgccgtgatcaagaagtacgggaagcccgacatcgtgcggatcgagatgggccgggacctgaacatgcccaaggacatccgggagaagtcccaccgcaacaaccgcgacaagcgggccctgcgggacgagtacgagaagttcctgaaggagaagttccacttcgaccgggtgggcaagtccgagctgctgaagttcgagctgtggctcgagctggagcactccggcgccgagctgagcaagctgaccagcgagctcagctcggacgacttccggcggttcagccggaacgtgaagcccagcgacaaggagaagttccggctgtggctggagtgcggccggatctccgtgtacacggggaaggtgatcagcgtcgagcgcctgttcagccccgagtacgaggtggagcacatcatcccgtactcggtgagcttcgacgacagcttcgccaacaagaccctgtccgagcggaccttcaaccgcgacaaggggaacaagacccccatcgagtacttcgccgagaacgaggatgagctgcggaagttcaagcagcgcaccaccaagttcgggaacgccaagaaggagcggctgctcctggaggagatccccgacgagttccgccccgaccagctgaacaacgaccggtgggtggccgtggccctgaagaagaagtgcctggaggccatcgagtccgtggaggtgaccaacggcgccgccacggccaagctccgccggtactgggggctgaacaccatcatcaagtccgaggaggacaagaagtcccgggacgaccaccggcaccacgccatcgacgccatcgtgatcgcctacacctccatccgcttcctccagcagatcagccggtaccactccctgcggatccacgacaaggtgatccaggaccgcttcgagcccccgttcgagggcttccggaacgaggtggtgaagttcgtgtccagcatcctggtgtcccaccgcaaggacaagcggctgctgagcacgaagaacaacaagtactaccaccggcggtccgggagccgggagcaccagaagggcatcatgtccgtgcgggggcagctgcacgaggagacaatctacggcaagatcctggacccctacagcggccgggaggagtacgtggtgaagaagcagctgagcaagctgacccccgagcaggtggacaagatcgtggacaagcccatcatcgagctgatcaaggagacagccgagctgaccggcaagtccatcaagcaggtcctgaacgaggacctggtgcagtacaacgaggccggcaagggcgtgcggatccgcagcgtgcggatcaaggccgtgcacaagccccagtccatcatcgtgaaggacaagaacggcaagatcagcgagcggaacgtgatgctgaagaacaactactgcgccaacatctacgccaacaagaaggggaagaagatcatgaacatcatctccttctacgacgcggtgaaccgcaagatccggaaccagagcctgatcgacgacttccccgagctggagtacctgttcaccatcacccaggacgactacctgctgatcctggacgagaacatcgacgacatccccgacgacaaggactacatcttcaaccacctgtacaagatccggaagttcaccggcaacgagatcggcatcctgcaccactgcgacagcgagaacaagaacctgtggcggatgaactgcagcaagcagaagtacatcaaggtggaggtggacatcctgggccggatcgagcggcggatc

SEQ ID NO: 121 - DNA, 3165 bp, synthetic construct
  source 1..3165: mol_type = other DNA
atgaagtggcggctgggcctggacctgggcaccaactccatcggctgggccgccctgaagctgtccgaggaccccaccgactgcagcaagctggcctgcagcgagctgctggacctgggcgtgcggatcttccacgacagccgcgagcccagctccaacggccgggtgggggagtccctggccgtgcagcggcgcatggccaggggcatgcggcgcaaccgcgaccgcaccctgaaccggtaccgcaagctgatgcggctgctgatcgagttcgggctgatgcccgacaaccgcagcgagcgcaagagcctgaagtacctgaacccctaccagatgcgggccgaggccgtggcccgcgtcatcagcccctacgagctggggcgggccctgctgcacctggggaagcggcggggcttcaagtccaaccgcaagaccgacaccgacgacaaggagactggcaagatcaaggaggggatcaaggagctccgggacaccctggagggccagaccctcgggcagtacctgtggaagcggtaccaggacaacctgtccggggagaagtccggcaaggtgcagggcatccgcttccgggccgaggaccccttcttccccgaccgggagatgtacgcccgggagttcgatgccatccgctccatccaggagcacgcccacaacctgtcccacgaccagtgggacaggatcaaggaggagtgcatcctgttccagcacccgctgaagcccatcgagcggggccggtgcaacttcttcccggacgagtaccgggcctggaccgacacccccatcgcccacgagtaccgcatctggcaggagctgaacaacctgcagtggcgggacgaggagggcatcagccacgggctgatggcccaccagcgggacgccatcagcgagctgatgttccagcagaacgaggtgtccttcagcaagatcaagaagctgaaggacaaggaggggaagctgctgttccccgacatcgtggagttcaacctggagtccgagaagcggaaggggctgaagggccacaccatcgccgcccgcatcgccaaggaccccaccctgaactccctgtggcggatcctgggcaaccagtggaacgaggtgttcgagactctgcaccaggccaccgacgacgaggaggccgagaagaacctcgagcgcatctacagcttctcccccgagcagatcaagtccctgctcagcttccacctgtcccccgggacgcagaacgtgtcccggaagttcatggagaagatcatccccatcatgcgggaccagggcatccgctacgacgaggcggtgctggaggtgaccgacgacgacgggaaccccctgcaccacagcctgtccaccatcaaggccgagtacgacttcctgccgtactacggcgagatcctgaagggcgccctgtacgggggccaccccgagaagtgcagccccgaggagaaccccgaggtgcacttcggcaagatcgggaaccccaccgtgcacgtggccctgaaccagctgcggaagctggtgaacaccctggtggagcggtgggggaagcccgagcagctgcacgtggaggtggggcgggacctgaagctgcccaagaagctgcgcgagaagatcgagcgggagcaggccgccaaccagaaggagaacgagacaatcaaggccgagctggagaagggcggcatcaagcaggtgtcccgcaccgacctgatcaagtaccggctgtgggaggagctgggcaaggacaagctgctccggacctgcccctacaccggcaagaccatcagcttcagccagctgatcaacggcgaccaggtggagatcgagcacatcctgcccttctcccggaccctggacgactccagggccaacaagaccgtgtccaagacctgggccaacaagctgaaggggaacaagaccccctacgaggccttcggcaacaaccagcacgccgacaagggcatcgtgtgggaggagatcctggagcgcgccgccaagctgccccagaacaagcggtggcgcttcttccccgaggccatccacaggtacgagaaggacaactccttcatcgcccggcagctgaccgacaacgcctacatcagccgggtgagcgccaagtacctgagctgcctggtgccctacaacaagatcgtgatgatgtccggccagatgaccgggatggtgcggggcaagtggcggctgaacgagctgctgcccaagcccatcgtggacggcaaggtggacgacaactggaagtcccgggacgaccaccgccaccacgccgtggacgccttcaccctgtccctgatggacaggagcctgctgcaggagatcagccggatctccgggcggcggcccaccggcatcttcgacatcgagctgcccctgcccgacaccgggctggtggagaaggccaagcagcggctgtccgagatctacatctcctacaagcccgaccacgggcacctgggccggatgttcatggaaaccgcctacggcgtggtggacgagaagctgctggaccccgagttcccggactacaacctggtgacccggaaggaggtgttcctcctctccgacaaggagatcctgcacatccgcgggaaggccctgcggacccggatccagcaggccgtccgccggggcgccgagaagggcctgaagcccgccgagtccctgaagcggttctccgccaagaccggcatcaagaaggtgcgggtctgggtgagcaacaagagcgcccagaacatccccagcgccccctggaaggcctacgccatggagagctacgtgtgctgcgacatctggcgcatccccaaggggaagcccggcaagtggaagaagaacgactacaagtggcagggggtgttctggtcctacgccgagacagtcggggacgaccccgacaagaacctgaagaagccccaccccgccgccaagttcgagatgcggctgtacaagctggacaccgtgatgaccggcgagggcaagatctgccgggtggccggctaccacgccttccagaacaagctggacatccggcccctgaacaagaccgacagctcccagaacttcatcagcatcaacgtgctgggcagcaacggcctgaagaaggccatcatcaccgtggacggccgcatctgcagcagctgc

SEQ ID NO: 122 - DNA, 3171 bp, synthetic construct
  source 1..3171: mol_type = other DNA
atgtccgactacatcctgggcctggacctggggcccaccagcgtggggtgggccgccatcctgatcgacaaggatggcaaccccaccgggttcgcccagatcaagaacgggcaggagtccatgcccgccatcggggtgcggatcttcgaggccggcgtggagaacctggggcaggggtcccaggagaagcccaagaacctggaccgccgggtgtcccggagcacccggcggctcctgcgccggaagcggggccgctacctgcgggtgaagaagctcctgcaggagaacaacatcatccccacccagaaggagagcatggacctcctgaaccagaaggacccctacgagctgcgggacaaggccatcaccaagcagatcggcctggacgagctcggccggatcatcctgcacatcacccggcggcggggcttcaagtccaaccgcaagacccccgacaaggacgcctccatgggggagatcaagaaggggatcaaccggctgaaggaggacagcaaggagaaaaccctggggcagttctggtacgcccagatccaggacaagcccctggaccccatccggaaccggcagggcggctaccactgggtggcccaccgggaccagtacatcgaggagctgcggaccatctacgagaagcagaagaactactaccccacgcagctcaccgagacactgtaccagaagctgaaccagaccatcttcttccagcagacctacgagctgtccaagcgcaagaagcgcaaggtgatcgggatgtgcagcctgatcaagggccagcggcggtgctccctggccgaccggcgggcccaggagttccgcctgctgcagaagatcaacgacctgaagatcatcatcaacgggaaggagtaccccctgaagaaggaccagcaccagatcctgtacgcctacctgatggagcacaaggaggccaagttcgacaagatccgggacctcctgaacctgcccgacgacgtgcggttcaacctgcactacaagaccaacgacaagatcctgggcaacgtgatcgactcctacttctgcggcaagaagatcttcggctgcaagcagtggaaaaccctggaggagaacgagaaggaggacatctggcagtactacatcaaggagtacctgtccgaccactccgacctgtccgccgacgagctgaagtcctactacgagaagaagtacgggctgaccgtcaaggaggccaaggccttcgacagcttcatgctgcccatgggcaacgtgagctacagcgccaaggtgctggacatcatcctgcccgacatgcggaagggcatggggctgtacgacgccatccaggggaagttcaagaagaagtggcggtgcctgaaggagctgcccctgcccatcaaggccaacgacttccactccaccaaccccatcgtggtgtccaccctgcaccaggtgcggaaggtggtgaacgggctgatccgggagctgggcaagccccgggagatcgtgctggagatgacccgggacctgaaggccaacgccgagcggcgggccgagatccagaaggatcagaagcacaaccaggacgagcggaagtcctgcgagaagcagatccggatcgagttcggctacgacgaaaccgtggccatcagcacccgggacatcaccaagtaccggctgtgggagagccagaagcacctgtgcgcctacagcctgaagcggatcgagctgtccgagctgttcacccggaacatcgagatcgaccacatcatccccgagtcgatgtccctggacaacacgatgtggaacaaggtggtgtgcttcgccaaggagaaccaggacaaggggcagcggacccccatcgactggctgggcgagcagtccgagcggttccagaccctgatggtggccatcaagaaggggtccctgggcaacgacacccggaagtgggagcggtactccatccgggccaaggacatcacggacaagtacacccccgagcggctgctgcgggacaccagcttcatcgccaccctggtgcgcgactacctgaagcggctgtacccgcaccacaccgccgaccagtgcgtgcgcaccaccaagggcggcgtgaccgccgagctgcggaacgtgtgggacatcaaccccatcctggccgacggggccatcgacaagaagaaccgcgacgacctgcggcaccacgccgtggacgccgcggtgatcgccgtgaccagcgtggggatgatccagaaggtgacccgcgcctggcagcagatctggccccggcggccctacgccagcgggaacatccccttcccctggccgtcctacgtggacgacctgctgaaggtggtggccggcatcaacgtgagccaccgcgtgcagcggaaggtgtccggggccctccacaaggacaacatctaccacctggagacaaacggccccaacgccgggaagtacaccaagcggcagccgctcaacaagatcacccggaagaacgccgagagcatctgcgaccggtccctccgggagttcatcatcaagcacctggaggaccacgggaacgacaccatccgggccttcgccgagccgctgctgtggcactgcaaggacggccgggaggtgatgatcaagtccgtgcggtgcaacaccgactacaagtccctcctgaagatcaaggagaacgcctacgtgcagagcgacaagaaccaccacatcgagatcttccggggcaaggtgaagggcaaggtggagtacttccacaaggtgtactccatctgggaggtgtcccagcagctgctgaagatgcgggggaagcgctcccagggcgagactgggcgcgccatcatcacccggcagaagccctgcccggacaacctggaggtgtccgacatggagttcgtgatgtccctggccaagggggagtccatcctgatcgacgacaagaaggtcgagaaccagcagatcctggcccgggtgcgggacttcaactccggcggggacagcctgtcctccgtggagctgaacatcgtgggccacaccctggcccgcgtggagggcaagatcgtgaaggacaccgccaacgcctaccggctgcggaacatcaacgagctggccaagctccacgtgaggaaggtgtccgtggaccccctgggccgcatccgctgggccaacgac

SEQ ID NO: 123 - DNA, 4002 bp, synthetic construct
  source 1..4002: mol_type = other DNA
atggccaagatcctgggcctggacctgggcaccaactccatcggctgggccgtggtggagaaggaggacaaccagttctccctcctggacaagggggtgcggatcttccaggagggcgtgaagatcgagaagggcatcgagtcctccaaggccgccgagcggaccgagcaccggtccagccggaagatcaagttccggcggaagctgcggaagatcgagacactgaaggtgctcagcgagttcgggtactgccccgagctgtccaaggaggagctggacctgtggcggtacaagaagatctaccccaacaacccagccctccggaactggtggctgaccgacgacaaggagaacaagcacccctactactaccggcacctggccaccacccagaagttcaacctgaacatcgagagcgaccggttcaagctgggccggtcgttctaccacatggcccagcgccggggcttcctgagcaaccggctggagtccaccaaggagtccaacggcctggaggaggagaagggcgagctcaccctgggcgagtacttctaccagaagtacgagaagggggagaagatccgggacaactacacccaccgggagaaggactacctggacgagttcaaccgcatctgcgacttccagaacatccccaacaagatcaaggacaagctgctgaaggccatcttctaccagcggcccctgaagtcccagaaggggctgatcgggaagtgcgtgttcgagcccaacaagcagcggtgctcagtgtccaggcccgagttcgaggagtaccgcatgctgtgcttcatcaacaacatcaagatcaagacccccgatgacgagaagctgcggttcctgaacaacgacgagcggaagaaggtgatctcccgcttcttcctgcagcgggagcacttcgacttcgaggatctggccaagcagctggcccccaagaagcagtacaagttctacaaggaccgcaacaagaaccccgaggactggctgttcaacttcagcatgaaaaccaccgtgtccggctgccccgtgtccgcccggttcaaggagctgttcgaggacatcttcatggacaagcagttcaactacatcaaggacgagactgggaacacccccaagatcatcgtggacacgtggcacgccctgtacaccttcgacagcgacgaccggctgaaggagttcgcccacaagcacctgaacctgaacaacgagcagatcgacagcttcctgaagatccggctgaagcaggacttcgccagcctcagcctgaaggccatcaacaagatcctgccctacctgcgggagggcctgatctacagccacgccgtgttcatcgggaacatggaggaggccgtgcccaacaacatctggaacgacaaggagaaccagctgctgatcaagaacgccatcaaggacatcatcaacaaccacaacgacgagacaaccatcatcaacatcgtcaacgggttcatcaccaacgccaagcgggagaacaccacctggtccgaggagtccaaggccatcctgctggaggagctgaacaacaagatcatccagaccttcggcaagtaccggttcgagtccttcagcgaggccaaaaagacccacctgaccgagcgggccaaccagctgctgatcgagaacatgcccaagaactacgggaagggcgagcacatcaaggcccagcggatcgacgaggccgtgcagaccttcctgaccgacaacttcgggaaggtcaacacggagaagatctaccaccccagcgccatcgagacatacaagcccgccaagcgggccgacgacggcaacctgtacctgggcagccccatgaccagcagcgtgcggaaccccatggccatgcgggccctgcaccagctgcggaaggtgatcaacgagctgatcaaggagggcatcatcgacaccgacaccaagatcaacatcgagatgtcccgcggcctgctcaacgccaacgagcggaccgccctgcggcggtggcaggacgaccgcgagaagcagcggaaggagtacgccaacaagatcaaggagcacttcgggaacaactaccagcccagcgaggacgagatcctgaagtaccagctctggatcgagcagaagggcgtgtgcctgtactcctccgaggagaactgccagatcaacatcgaggacttcctggggaacaaccccagctgcgacatcgagcacaccatcccccgcagcctgtcctacgacaacagccaggagaacaagaccctgtgcaagaacgaggccaaccgcaagatcaagcggaacaagatcccctacgagctgtccaaccaccaggagatcctgctgcggatcgagcactggcgggagaagatcgagagcctggacaagcagatcgagatcaccgtgaagcgggccaagggggcctccgacaaggcccgcaaggacagcgagatccagaagcggcactacctgaccttcgagcggaactactggcggaacaagtacaaccgcttcacgatgaaggacgtgcccgacggcttcaagaactcccagatggtggacatcgggatcatcaccaagtactcccggctgtacctcaagaccatcttcaacaaggtgtacacggtgaagggctccaccgtggccgacttccggaagatgtggggcatccagaactcctacgagaagaaggcccgggtgaaccacatccaccactgcatcgacgccatcacgatggcctgcatggacaagtccaactacgagactctggccaagttctaccacgacagcgagaacgccttccagaacaacagcagctccaagccctacgtggagaagccctggcagtccttcaccgaggacatcctgagcctggagaacgagatcctggtgagccactacacccccgacaacctgcccaagcagagcaagaagaagctgcggaagcgcggcaagatccagtacaacgagtccggggagcccaagtaccagcagggcgactccgtgcggggcagcctgcacaagaaaaccttctacggcgccatcgagcgggaggtgatcaacaagaagggcgagagcgagaaggtgatcaagtacgtggtgcgcaagagcctggccagcctcgaggacaacaacatcaagaacatcgtggacgaccgcgtgcggaacatcgtgatcgaggcccggaagcaggagaaggagatccagaagcagatcgacgccctgaccaagaagcggaagaaggccgaggagtgggaggaggtggagatcgacgaaacgatcgccaacctcaagatccagatcgagcagctgtacaccctgcccaacaagaacgggaacagcatcccgatcaagaaggtgcgggtgtaccagcccaccgtgaccaacccgctgaacatcaagacccagcgggacaagagcaccaagtccaagaaggagtacaaggagcactaccacgtggccaacgacggcaactacctgatggccatctacgagggcaaggacgagaacggcaagaccgtgcgggacttcgagctggtgaacaacctgaacgccggcgagtacttcaagctgagcgtgcagaaggacctggagggccaggacctcggcaagtacgagggcctgatccccaagtccaagctcaccaagaagatccagatccccctgaaggccgtgatcaacgtgggcacgatggtgatcctgtgggagaacacccccgacgaggtgtgggacctgagcatcgaggagatcaagaagcggctgttcaaggtgaacggcctgagcatcctgaccatccagaagaagtacaactacggccggatctacctgaagatccacaacgactcccaccccagcaccgagctgaaggagcacagcggggagtacaagtccaccgacgacatcttcccgttccgcatgatcctgcacaaccagctgaacgccctgatcgagggcatcgacttcaccatcaccccgctgggcaagctgatcaagatcgagcac

SEQ ID NO: 124 - DNA, 3216 bp, synthetic construct
  source 1..3216: mol_type = other DNA
atgggctacatcctggggctggacatcggcaccaactccatcgggtgggccatcctgcgggaccggtccatcgtggacctggggatccggatcttccccgtgggggtgaaggaggacctctacaacaagtccggcaccgaggagagcaagagctccgcccgccggaccgcccggggcatccggcggctgtacgaccggtacaagctgcggcggcggcagctgaagaagctgctgctgtccctggacatgatgcccccggagatcctgtccctgtccagccgggagctgtacgccctgcgggcccagagcctggacgagcggatcaccctccaggagctgggccgcatcatcctgctgctgaaccagcggcggggcttcaagtccaacaagaaggagaagggcagctccgaccagaagaaggagctggagggcatcaagctccagatggaggagctggagatgaagatcgccagctccgggtgccggaccgtgggggagtacttctactccctgttcacggaccagtccagccagcagaactggcacaacacggacgagcccgtggagcggatccggaagcggttcgtgttccgcaagacctacgagaaggagttcgacctgatctggtccaagcagaaggagtactaccccgacgtcctgaccgagggcaactacaagaagctgaaggagaactgcctgtactaccagcggcccctgaagtcccagaagcacctggtgggcaagtgccgcttcgagccccagaagcgggtggcccccaagtccagcttcgacttccaggagttccgcatctggcagttcatcaacaacctgcggatcaccgggggcaaccggttccgggagtccctgaccctggaggagaagctgcgggccgccggcgtgctgcaggaccagcaggagatgagcgtggccaagctcaagaccgagctgaacctgcccaagtcctacagcttccagaaggacctgccccagaagatcaagggcaacaccaccaacgccaagctgcagaacgccctgggcaaggagaacttcgactccctgtccggggacgtgaagtacaagctgtggcacacgctgtacttcgccaacgacgaggagtggctggagaagtacagccagaaggacctgaagctgacccccgagcagaccaaggagtacatgaagatcaacctggaggaggagtacggcaacctgtccgtgaaggccatccggaagatcctgcccttcatgaaggccggcttcgactacgcccaggcctgcgaggaggccggctaccaccactccttcgacgaggtggaggacggcaaggagcgggagctgaaggacaagatcgagcggaacaaggaggacgacctccggaacccgctcgtgcagcaggccgtggccgagacaatccggctggtgaacgagatcatcaaggagtacggcaagcccgaggccgtgcgggtggagttcgcccgccagctcaagtggacccgcgagcggcgggagaagtacaagtcccagaacgacgagaaggagcggacccgggacacctaccgggagttcctgaagcacaagctccagatggagaacgtgtccaagagcgacctgctgaagttcgagctgtggctggagatggagttctccgagacagagctcgagaagatcaccaggtccatcgacatgaccgagttccgcaagttcgccaagcacgtgaagcccggcgacaagcagaagtacgagctgtggctggagtgcgggcggatcagcccgtactccggcaaggtgatcaacctgcacgccctgttctcccccgccatcgaggtggagcacatcctgcccttctcccggagcctggacgacagcttcgggaacaagaccctgtgcgagcgggagatcaacgccgccaagggcaaccgcacccccttcgagtacctgggggagaacccctacgagtggcagaagttcctggaccgggtcaagagcttctccgagggcaagcaggccaagttctccgccaaggacctgcccgccgacttcatcagccagcagctgaacaacaccgcctacatcgccaagcaggcccggaagaagctcaagaccgtgtgccccgacgtgaccgtcaccaacgggcaggccaccagcttcctgcggcggctgtgggggctgaacaccatcctgaaccccaagggggagaacgtgaagtcccggcacgaccaccggcaccacgccgtggacgccctggtgatcgcctccaccacccccgccgacatcaagatgctgagcgactacgccaagttcgacgccagcgggaagctgaccctgcgggacgcccccacccccttcctggagttccgggagcaggccaaggagctgctgtccaccgtgttcatcagctacaagaacaagaagcggctgatcaccaccaagaagaacaagtacatccacagccggaaggactgctccaccgccaacatctccatccggggccccctgcacgaggaaaccttcttcggcaagatctccaacccccacaccgggaaggaggagttcgtgatccggaagcccctggtgagcatcgagacagagaagcacatcgccaagatcatcgacccggccatcaaggccctggtgatcaagcacgtgcaggagcacgggggcaacatcaagtccgccatggccatcgacctgttcatgaccagcaagagcgggaagaagatccccgtgaagaaggtgcggatgcaggagagcagcgaggacctgatccagctgcgccccaacgagaacaacaagctgttcgtgtcctccggctccaactacctgatggccatctacgagaaggagggcaagcgcaccttcgagaacgtgagcttctacgaggccgtgcagcggcggctgaagggcctgcccatcttccccatcgagaaggacggcaaggccttcctgctgtcgctgacccagaaggatctggtggtggtctacgagaacgaccccgacgagatcgactgggagaacaaggcccagctgttcgagagcctgtacctggtgcggaagttcgaccgcaacgggaacatctgcttcgccaagcacaacctctccaacgtgaaccccgaccaccccaaggactacccctccgggtgggtgctgaagaagtccagcaaccggctgcgcgccatcaaggtgcggatcagcatcaccggcaagctgatccgcatc

SEQ ID NO: 125 - DNA, 3153 bp, synthetic construct
  source 1..3153: mol_type = other DNA
atggagaacatcgccatctccgaggacctggtgctgggcctggacctgggggtgagctccatcggctgggtggtgctcgacaagaagaacaagaacgagttcacccggatcgtggactccggcgtgcggatcttcgaggccgggatggacggcgacatctccagcggcaaggccgacagccacgccctggcccgccgcaacgcccggcagatccgccgccagacccagcgccgggcccggcggtcccggaaggtgatgtaccggctgcaggagatgcggctgctgtccgaggggacagtgtccgacatcatcccgcccctggacaaggagctggccgccaagtaccaggacgtgttcgacggctccaaggagctgaccctgagcaacatcctgccctactggctgcggaagcgggccctggacgagaagctgtccccctacgagctggggcgggtgttctaccacctgtcccagcggcgcggcttcctgtccaaccgcaagtccgccgcccgggacaacgaggagctgggcaccgtgaaggagggcatcaacaacctgtggaaggagatcgaggagactcggtcccgcaccctgggggagtacttcaccaccctgaacccccacgagcagcggatccgccagcggtggacccaccgggacatgtaccggcaggagttcgacgccatctgggcctcccagaaggggtaccacgactgcctgacccaggagacatacaagaccctctcccacgccctgttccaccagcggcccctgaagtccgccaagcacctggtgggcaagtgcagcctggagaagtccagccggcgggccccctacgcctccctggaggcccaggagttccgcctgatctctatggtgaacaactgcaccgtgatcacccccgacggggagatccggcccttcaccgacgaggagcggaacacgctcctcgagcacctgcggaccgagggcgacatcaccttcaacaacgccaagaagctgctgggcttcaaggcccgcagcacccacttcaacctggaggagggcggcgagactcggttcgtggggaaccgggtcaacgcctccctgaagggcatcttcggggacaagtggctggacttcgacaaccagaagaagaacctgatcatcaacgacctgcgctgcgtgcggcagagcctgtgcctgttcgagcgcgggatcaacgtgtacggcctggacaaggagcaggccgagaagttcgccgagctggagctggaggacagctactgcaacctgtcccggaaggccatcaagaaggtgctgcccctgatgcagaccgagaagatgacctacgccgaggccaggtgcaagatctacggcgagagcctccaggccggcgagcccctgaacatcatccggcccgtgaacaagttctccgacatccggaaccccgtggtgtcccgcgtgctgaccgagacacgcaaggtggtgaacaacatcgtgcggaagcacgggaagcccggccggatccggatcgagctggcccgggacatgaagaactccgccagccagcggcaggccatcgccaagcggaaccgggccaacgagggcaaccgcaagaagatcgccgaccgcatcatcgccaacaccaacatcaagaacccccggcgggacgacatcctgaaggtccagctggcggacgagtgcgactggatctgcccctacaccgggaagcagatgtgctggaacagcctgttcggctccagccccagcttcgacatcgagcacatcatccccttctcccggagcctggacgacagcttcgccaacaagaccctgtgcgactcccactacaaccgcaacatcaagaagaaccgcgggcccggggagtacgtgcagcccgggtccgaccagtgggacaccatcatgggggccgtgagccggttctccggcgacaagaaggtgaccgccgagaagctgcggcggttccagctgaccaccaagcacatcgaggagctgaccgaggagttcccctccaaccagctcaacgacacccggtacgccagccggctcgcctgcgagtacctgggcgagctgtacggcggccaggtggacgccgaggggatccggcgcatccaggccgccaaggggaacatcacctactacctgcgggaggcctggcagctgaaccacatcctgggcgacggcgtgaagaaccgggacgaccaccggcaccacgtggtggacgccctggtggtggccctgatgacccccgccaccatccagcggctgaccaacgccgccgtccagaactacgagcggagcaccaacaagggccggttcaagatgcccaagatgccctgggacaacttctgggaggacgccaagaacgccatcgacgacatcatcgtgtcccaccgggtgaaccacaaggtgaacgggcccctgcaccaggagtccaacttcgcccccgtgtccgtgatcgagaacggcaaggtggtgaacgagacacacatccggcgggagctggccaagctgaagatcaacgaggtgaacaagatcgtgtcctccgtggtgcgctccgccgtgaaggccaagctggtggagctggacaccgacgaccccgccaaggccttcagcgaccccgccaaccacccctgcatgaaggccaaggacgggcggatgatccccatccacaaggcccggatcaagatctccgcctccccggtgaagatcgggcaggaccgccgggagcggtactgcaccaccgggtccaaccaccacatggagatcttcgccatcctggacgaccagggcaaggagatcaagtgggacgccgccgtggtgtccaccctggaggccatgcggcggaaggccaagcaccagcccatcgtgaaccgcgaccacgggccctccaccaagttcaagttctccatcagccccggcgacaccttctgcctgaacaagcccaagttcaacatgcccaagctggtgcacatccgctgcgtgcccgagagccagcagatcatgttctgcgctctcaacgacgcccggaagcaggccgacatcaagaaggccaaggagtggttcagcagcaaggtgcgccccttcaaggagctggagcccgagaaggtgatcatcagccccctggggcgggtgtggaccgccaacgac

SEQ ID NO: 126 - DNA, 3174 bp, synthetic construct
  source 1..3174: mol_type = other DNA
atgaccaagtccaactggaacaagtaccggctgggcatcgacctgggcaccagctccatcggctgggccgccatctccctggacgagcgggacaacccctgcgccgtcctggacatgggggtccggatcttccccgatgggcggaagcccacggacgagtccagcaaggccgtggaccggcggatcgcccggggccagcggcgccggcgcgaccgctacctgaagcggcgcgccgagctgatgcaggccctggtggactacaagctcatgccgctggacaagaacagccgcaaggagctggagaagctggacccctacgccctccgggcctgcgccctggacagccccctgaagccctacgagctgggccggaccctgttccacctggaccagcggcggggcttcaagtccaaccgcaaggccgggaacgaggacgagtccgaggagaagaagctgtccgccgccatcggcgagatgcggcggcgggtggaggagtccggcgcccggaccctgggcgagttcctggcccggcggcacgagcgccgggaaaccgtgcgggcccggaccgacctggggatctaccccgaccgggccatgtacgagtccgagttcgacgccatccgggccgcccagaagccgcaccagcggctgcggcccgagcagtgggaccggctgcgggacatcatcttctaccagcggcccctgcggcccgtggaccccgggctctgcagcttcgagcccggggagaagcgggccgcccgggccctgcccctgttccaggagttccgcatgctgcaggagctcaacaacctgaccctgcaggtgggggccgagcccgaccggcccctggacgagcgggagcgggagcgggccctgatccggctccgctccggcaaggggatcgacctgcagcggcccaccaagagcctggacctgccctccggggccaccttcaacctgtcccgcttcggccggaaggccgtgaagggggacgagacaaccttccggctggtcaaggacgagctgttcggcgtgcggtggatcggcctgtccctgcagctgcgcaacgagatcgtgcgcttcctgctggagacagaggaccccgacgacgtgcgccggaaggccgccggcgagtggggcctgaacgaggcctccgccaacgccgtggccaacgccagcctggcccccggctacggcaacctgagcgacaaggccatccagaagctgctgccccacctgcagcaggggctggtgtacagcgacgccgtgatcgccgccggctacacccaccactccgacttccggaacgccgaggcccacgaccggctgccgtactacggcaaggtgctggtgcgggacgccgtgggggccgaccccgagaagaaccccgagaaggacggcgagcccgcccggtacggccgcatcgggaaccccaccgtgcacatcgggctgaaccagctgcggcgggtggtgaaccgcctgatcgacgcctacgggaagccccaggacatcgtggtggagctggcccgggacctgaagatgaacctggtgcagaagcagcagctgcggcggcagcagcaggccgggttccggcggaacgaggacttcaaggagatgctgaagtccgccggcatccccgtgacccagcacaccctgcacaagctgcagctgtgggaggagcaggggccccctcaggcccgggtgtgccccttcagcggggcccacctgagcttcgctatggtcgtggtgagcaaccagaccgaggtggagcacatcctgccctggtcccggaccctggacgacagccccgccaacaaggtggtgtgcaccatcaaggccaaccgggacaaggacaaccgggccccgcacgaggccttctcccacagcccgcccggctacgactaccaggccatcctggaccgggccgccaacctgcccggcaacaagcggtggcggttccagcccgacgccatggagcggttcgaggacgaggccggcttcctggaccggcagctgaacgaaaccagctacctgtccaggaccgcccgggcctacctcgcctacctgtacgacgagaagggcgagggccgggtccgggtgcgggccgcccccggccggctgacctacctgctgcgccgggggtggggcctggagggcatgctgcgcgtgaccgagacaggcgagatcgtgcgcaagcagcgcgacgaccaccgccaccacgccatcgacgccttcgtggtggccaacaccacccccgccctgctgcggcggttcgcccaggccgccagcagcaagcacgggaacgtggtggagcggctggccgccctgacccctcccccgtgggaggggttcgacagggaccacctgcgggccttcctgaaccgcctggtggtgtcccacaagcccgaccacgggaagcggggcgtgatgggcaagaccaccggccagctgcacaacgagacagcctacgggctgatcgagctgtccgccgacggccccagcaaggtggtcacccgcaaggacgtgagcgccttcaagcggcgctccgacctggactccgtgcgggaccccgccctgcggcggtccctgcaggagccctgggacaaggccggctccaagccggccgagttcgcccagcaggccgccaacgagggcgtcctgctgaacggccgccggcagcgggtgcggcgggtgcgggtggtggagaacctgcgggtggtgcccgtgcgggacagcgagggccggccctacaagggctacaagtccgacaacaacgagttcgccgaggtgtggcggatgcgggacggccggtggcggatcgtggtggtgcccaccttccacgccaaccagcccgacttcgacatcgagaagttccggccctcctaccggggccggatcgaccccaccgccaagcgcctgatgcgcctgcagaagaacgacatgggggccctgggcgagggccccagccggcgcatcgtgaaggtgcggcaggtgtgggccggcaccgtgatcctggacgaccacaacgaggccgacgtggacgcccgggagcggcgcggcgaggtggaccgcaacaagaacagctacagcgccaagaagctgtacgagcgggacttccggaaggtggggatcgacgagatcgggcgggtgctggaccccggcccgcccaagccc

SEQ ID NO: 127 - DNA, 3222 bp, synthetic construct
  source 1..3222: mol_type = other DNA
atgcggaagtaccggctgggcctggacctgggcaccaacagcatcggctggtgcgccgtgcagctggacttcgagggccggcccagcgacgtgctggacgccggcgtccggatcgtgagccccaacgaggaggccggccgggacccccagtccaagacgtcgctggccgccacccggcggcagttccggggccagcgccggcgccggaaccggttcacccgccgccgggaccggctgctggacctgctggtccgcgccggcctgatgccccaggacgcccaggcccggaaggccctggagcgcctggacccctacttcctgcggcaggaggccctggaccgggtgctggagcccggcgagatcggccgggccctgttccacctgaaccagcggcgggggttcaagagcaacaggatcgccgacagcggcgacgacgagcgcagcgccatgaagctggccgtcaaggccctcgaggaccggctggagtccgagggcgcccggaccctgggcgagttcctcgcccggcggcacgggcgcgaccggtacggccgccgggacaagggggccgccgcccggccggtgcggttccgcgccgacaccgacggcgggaaggccctgtacgacctgtaccccacccgctctatggtggagcaggagatcgacgccatctggcacgagcagaagaagcaccacccccggctgctgaccgacgagctgctggggaagatcaagcggatcgtgatcgagcagcggcccctgaaggaccccatcgcgggcaactgctccctgttccccagcgagaagcgggcccccaaggcccacccgctgtaccagcggttccggatcatgcaggacgcctgccagctgcgcgtgatccggcgggggcaggccgagcggcccctgcgggtgagcgagttcgagctgatcgtgggcgtcctgctgaagcggagcagccggatcgtggagttcgagaagctgcggcgggagctgaagctgcccgacgacgcccggctgaactacgagcggagcgggcggaagggcttccagtgcgacgagacagcccgcgtgctggccgccaagcggaccttcggcgccgcctggcggcggctcgacctggaccgccaggtcgagatcgtcgagcggctgctggaggaccaggacgaggtggccctgtgcgactggctgcaggccgagctggagctggacgccgccagcgccgagcacgtgtccggcatccggctgccccagggccacggccggttctccatcgccgccctgcggcggctggtggagacaatgggccgggagtctcgggaggcccacgaccccgccaccggggaggtgtacaggcgccccctgacctacgacgaggccatcgagtgcctgggctaccaccacagcgaccggcggcccggcaagctgcacgagcggctgccctactacggcaaggtgctggaggagcacgtgatccagtggcccaacgcccccaagggcagccacgaggccatcggccgggtcagcaaccccaccgtccacatcggcctgaaccagctgcggctggtggtgaacgccctgatcgacgagtacgggcccccggaggacatcgccgtcgagctgggccgggagctgaagctcaacaaggagcggaaggagcgcctggaccggcagaaccgcgagaacgagcggaagaacaacgagttccgggacaccctgtccgagctggggctggccgacacctacgacaaccgcatgcggctgcggctgtaccacgacctgcccgccctcagccggatctgcgtgtactccgggcggcccatcagcgtgtcgatgctgttcagcggggagatcgagatcgaccacatcctgccctacagccagaccctggacgacggcttcgccaacaaggtgctgtgcctgcggaaggtgaaccgcaagaagcggaaccgcgcccccgagtccgtgtggaccgggaaggagctggccgacatctgcgagcgggccgagagcctgttccccaagaaggcctggcggttcgcccccggggccatgcagcggttcgaggacgagggcggcttcctggcccggcagctgaccgacacccagcacctgtcccggctggccaaggcctacctggagaacgtgtgccggagcgtgcgcgtgttccccgggcggctcaccgccatgctgcgggcccggtggggcctggacgggctgctgtccgaccacaaccgcaagaaccgcaacgatcaccggcaccacgccatcgacgccttcgtgatcgcctgcaccgacctgggcctgctgaaccgcatcgccaacgcgagcgggaaggccgaggagctcaacctggagcggctgttccccaaggacgccttccccatccccttcgaggggtaccacaaggccctggacgcccggctgcagatgctggtggtgagccaccggcccgaccacgggctgcggccgggcgccgggaacgacgtgcacatgaccagcgggcagctgctggacggcatggccttcgggcaggtggacgaggtcgtcgatggcaagcggtacaacctggtgcggcggcggcccctgcgggagctgaccgcccccatgatcctgcggatccgggaccacggcctccgcaacgagctggcgatggtggccaaggacgccaagctgtccggccgccgcctggaggacgtgctcctggagttcgggaccgcccgggacatccgcagcgtgcgcgtgctggagacaaaggccagcgtgcgcgaggtgcggcacatccggagcctggacggcttcgggttccggaaggcctacgagacagccgacaaccactccatcgagatctaccggctgcccaacggcaagtggcagggcgagggggtgaccgtgtacgacgccaaccgccccggccacgagcccaactggcgcaagacctacccggacgcccggctggtcatgcgcgtgcaccggggcgacttcatcgaggccgacctgggcgaggggcgccgggtgtaccgcgtggtgcagctgcggcccagcgccaacaaggtgttcctggcccagcacaacgaggccggcagcctgcagaagcggcacaagtcctccaccgaggaggaccccttccgcttcatgatgcccgtgtactccaccctcaagaccgccaaggcccggcgggtgcgggtggaccccatcgggcgggtgcaccgggtcaaggcccgccgg

SEQ ID NO: 128 - DNA, 3738 bp, synthetic construct
  source 1..3738: mol_type = other DNA
atgaagaacaagaacaagaacccctacatcctgggcctggacgtggggtccaactccatcggctgggccgtggtggactgcatcaaggaggagggcgaccacaagggcatctacgccggctacaagcccacctccctccgggccctgaactcccggatcttcctggagatggtggaggccaagacccgggtgcccaagaaccagaagcgccgggagaagcggggcgcccggaagcggcgcagcttctacaagcggcgccgcgagaagctggtgcggatcctgatcgacaagcggctgctgccggaggactaccggcagtgccccgaaaagaccctgaaccagatcgaccgccgctacggcgagcggaaggtggggaagcactggagcaagacctggtccgtgaccgagaaggcccactgctccccctacgccatgcggaacttcgccctcgaggagaacctggagcccttcgagttcggccggctgctgctgcacctgcagcggcggcgcggctacttctccaaccgcggcgccaagtacatcgagctgatcaagcacctgtccctggactcccccgaggacgggcaggagtccatgtccgtggaggagaagaaggagacaggcaaggtgctgcaggccatcgagaagctgcacgaggagctcgagggctccaccctggggcagttcatctggcagaagtcccagaagcaccagaagccgccccaccgcatcaccctgttcgagttcgagaagtcccggacccacaagtccgagactcggatcgagcggctgcagttcagggccaagcgggagatgtacgagaaggagttcgacgccatctgggagaagcagtccaacttccacgacctgtccggccagaagcacgagatcaagcacgccaccttctaccagcggcccctgcagctgcagaagaacgccgtggggaactgcaacatctacccccacaagaagcggagcgccctgatgcggctggagttccaggagttccgcaccctgcagatgatcaacaacctgaaggtggacgggaaccccctgtccggcgagcagcgcaacaagctgtgggacgccgccaacgaccccgacaagctgaacgagtccgggcggatcccctggaaggaggtggcccggatcctggagatcaagcgggccaccctgaactacgagacaaacgaggacggggccggcaagaccggcctgatcggcaacaagaccgccaaggccatctccgccagcatcggcgccaacaagtggcgcgagctggggaaggacaagcagatcaagctggtggaggacctgcagaccatccacaacaagaaggacctgtactaccggctggtgacccactggaagttcgccccctaccagcccggggacaacaagaaggagaagggggccctgggcctgacgatggacgaggagctggaggacggctacgggaagcactccctgaaggccatcaacgagctcctgccccacctgcgggacggcctggactactacaaggccgtcgagaagatcgggcaccgggagtccatcacccccaaccagcgcaagaccgaggacgactacgtgctgtccgtggccgacgtgcccaacatcgccaaccccgtggtgcagaaggccctgtacgagatgcggcgggtggtgaactccatcgtcaagcggtacgggaagcccgtgatcatccggatggagatggcccgggagatgaagtccagcaagaagcaccgggccgagatcgcctcccagcagaagaagaaccgggaggacaacgagaaggccgagagcgagatcctggactactggcagaacgggaagaacccccacatcgagctggagcagctgcggaacaaccgggcccgggtgagccggaacgaccgctccaagtacaagatgtggaagtacgagcaggacgagaagtgcccctactgccagcggcccatcgggcccaaccagctgttcagcggggacgccgagatcgagcacatcctgccgtacaccgggttccggcagaactacctgaacaccctggtgagctgccgggcctgcaaccagcggaaggggcagcagaccccctacgaggcctgggggtccgaccccgaccagtgggagcggatcgaggagttcgccaagggcaagtacgtgcgggagctgtacggcaagcagcgccggatcctggagaagaagcacagccccgagactgtggacgacttcgtggagcggcagctgaacgacacccggtacatcgccaccgccagcaagacgatgctgcagaagtacggggtgcccgtggacgtgaacacgggcatggccaccaacgagctgcggcaccagttcgggctgaacaacatcctgccccacgagcccgacaccgacgcctacatccccaccggggacaaggtggacaccgccaccggggagatcctgcagttctccgccgacaaggccaagaagtcccggcaggatcaccggcaccacgccatcgacgccttcgtggtggccatgaccgaccgcgccatgctgaaggcgatggtcgacgcccaccagatcgagcaggacaacaagaaccccagccgccagaaaacccgggaggaccgcatccgggagcggcggctggtcctgcccgagagctgggaggagagcgaggagctgcactccgtgctgaaggggaagctggtgaccaccgtcgccagccatatggtgaagcgcaaggtgtggggcgccctgcacgaggagactctgtacggcaagagctcctacgaccagagcctcgacatcgagggcatgaccaccgccatcctgaagcgggtgcagcgggtggcggaggccgacacctccaacaccgactggatcgccgacgaggagctgcggtccatgctcgccgactggagcaaggagatgctggagaagaagcccagcgaccgggtgctgccctactggaagggcaaggagctgaagaagttcgactaccagtgccccaccgtgaccgtgcggcgcaagctgatggacgagctgggcctgctgtccgggctcaaggaggagtggaagcccggggccaagacctgggtggccgacaagtccatccacgacgccctgttcaagtggctggaggagcacgggctgaccggcaagaaggggaaggagatcaaggaggtgctgaccaaggtgcctccccgggtgctgaacaagaagggcgagcccagcacccccatcctgaacgtgcggatcgcccgcgccatgaccgactcctacatcaagatcgccaactcctacgtgcagcccggctccaaccaccacctggtgatctaccacaacgggctggagggcaagaaccgggagcggcgggtggagatggtgacgatgctggaggcggccaagcgggccaagtccaacaagcccgtgatcgaccgcaacccgcccctggagtgggacggggagtggcactacgagctggacctgtgcgtgaacgatatggtgcggtgcgaggacctcgacatcttcgagaacgacaacttcgcccccgagcaccgcgccagcccctggttccgcgtgcagacgatgaacagcggcggccggaacaaggtggacctgcggctgcgccaccactccgtgagcggcaccgactccaactgggggctgtggcggatccgcagcctgaagaacgtgcggtgccgcaaggagcagatcggcaacctggggctgctggtggacgacagc

SEQ ID NO: 129 - DNA, 5007 bp, synthetic construct
  source 1..5007: mol_type = other DNA
atgcccgagaagcccatcatctcccccatcagcatcgacctgggggcgaagaacaccggcgtgtacttcgcccactaccaggagggctcctccatcgagaacatcgagaaggagggcaaggtgtacctcctggagaaggacaagtacaccctgctgatggagaaccgcaccgccgcccggcaccagcgccgggggtacgaccggtgccagatggtgaagcggctgttcaagctgatctgggagaagcacttccacctggagtggaacaaggacgtgcagcaggccacctccttcctgctgaaccggcggggcttcaccttcctgaccgaggagtacgacaccgagaagctgagccggttccccaaggaggcctacaagctgctccccgacgagctgaaggagaacgtggcctgcaccgacgtggagtacgacttcagcgtgaagctgaaggagtggaccaacgagggggaaaccaaggtgaaggagatcttcgaggccctgatcaaggagcccaagcggatcaccaagcgccaggtgctgatcgggcgcaccaagaagctgcgggagtactgcgagatccgcaagaagcgggagaagatctccgacgagaagcggaaggtgctctcccgcctgtccaagtggatctggaacgagtggcagcagaacggggtgcagggcctggacgagaacttcgtggccaagaacaagtccgacgactccgaggtggagtggaccttccccggccacttcgacctgatcatctacctgaacaaccagtcccgggacatcgcctgccagatcctggacagcctgcccgggaccgcctccgaggagaaggagctcaagacctgcgtgtggaacttcaagaccgagaagttcgacctggagaaggccgggctgggcttcgaccagcccgacaactccggcgacagcgccagccagggccagcagaaggagtggctcaagacccacctgcaccacctggccttcgccctgcacaagaccctgcacgagctggagtccggcgggcggcaccggtccaagtacttcgaggaggtgaagaaggtgctggagaaccccaaccacacccacgactacctgaagaacttctgccggaagctgcagtccgggtgctaccccgacctggacaaggtgaacttcgccaacctgatcgggcacatcagcaacctggagctgaagcccctgcggaagtacttcaacgacaagtcccaccgcaactccgactactgggacgagacacggctgaacgagctgttcgaccggtggatcctgcgggagtggcgggtggacaccgggaaggacaaggagaaggccgacgggaagcggggcgactacaagaacctgcaggagtgctggaacgactacaagaaaaccaaccccaacaccgtgatcgacttctggctcaagaccaaccccttcttcaccatccctccctaccaggacaacaacaaccggcggcccccgaagtgccagtccctgatcctgaaccccgagttcctgaaccgcaagtaccccgagtggcaggactggctcggggagctgcggaagctgcccaccgtgggcgagtacctcgggaacttcgtgtgccagctgcggtccctgaagggcggcggcaagagcacctacttctccgacaaggagacagagcccaagaagaagaacggcaagcccaagagccccaaggagctcaaggccggcaaccaggagcgccggcccctggaggccctggacgcccggatcctgcagttcatcttcgaccgggtcaaggccgacgaccccctgaagctgaacgagatctactcccaggccaagaagtggcggcaggagcagtccaccgagaaggagaagcaggacgccaagtgcaagctggagatcgccatcggcgagtccggcctgcccaacgggctcaagaccaaccgggactacgacaacaaggggctgctgcaggaaaagaccttcctgcacctggtgtgcaagtactacaagcagcggcagcgggccaaggacggccggctgttcatccaccccgagtaccggtacgtgaagggccgggggtacgagaacaccggccgcttcgacgaccgcaactgcctgctgacctactgcaaccacaagccccggcagaagaagtaccagtccttccacgacatcgccggggtgttccaggtcagcctggaggagctgaaggagatcatcggctccaccgacgacagcgaggtgatcaagtggctgaagtccttcaaggccgagcggagcagcctggagggcatctgcgagcgggccgccaaggcccagaaggagcaccggggcttcctgaaggagaacatgcgcaaggccgtgtccgcccacagccccggcgccgacgaccgggagctgcggaacctggaccagaacatcaaggccctgagccacgagctggccaagagcctgttcggccagcgcatccagcaggacgacccccgggcccagaagttctgcagcgtgttcagcttcgcccagatccacaacatcgccttcaaggaccggtccggcaacagcaacacctgcgccgtgtgcggggccgacaacgcccaccgcatgcagatgaccgagaacaccgggtccaaggagggcagcgccaaggcccagcgcctgcccgccatccccacccggctgatcgacggcgccgtgatgcggatggcccgcatcaccggcggcgcgatcgccgaggagaagtggaagaagatcgagaagtccctgaagcaggagaagaaggtgcgggtgcccatcatcaccgagagcaaccggttcgagttcgagccgagcctcaaggagatcaagggcaagtccctgaaggacaccgacaagctgtcccgggagaaggggcaggagcagctggccaccaacaaggacgagcggatcaaggaggccagcctgggcatctgcccctacacgggcaagaacctgcccgagaaccggggcgacaaggaccacatcatcccccggtcctccaagcgggggaccctgaacgacgaggccaacctgatctgggcctccgacaccgggaacaagaagatcaagaaggacaaggagttcagcctgcgggacctgaagaaggcctacaagcagaagcagttcggcgccaaggacgaccaggagatcaagcagtggatcatcgagcagatcggggacggggagggcgagaacttctccttcgggaagtaccgctccttcaccaacctgaaccaggaccagcagaaggccttccggcacgccctgttcctgaagggcgagcccctgcgggagaagatcatcaacgccatcaacaaccgcacccggatgctggtgaacggcacccagcggtacttcgccgaggccatcgccaactccctgaacaagaaggcccgcaccatcggcaagcagagcctgctgtccttcgacttcttcggggtggaggcccagtccaacacccggggcgacggcatcaaggacctgcggaacgagtacgagaaaaccgggctgatcgggcaggagtacgccaagaaggagggccagaagcagaagccctacagccacctgatcgacgcccagctggccttcgccatcaccgcctgcgcccacaagaacgccggcgggctgcggctgaccatctgcgactccctgaacctgtggcccctggacaaggacaccggggagatcttcgaaaagaccatcttcgggtccatccaggtgaagcccgacgagatgcagcccctggaggagctgcagcggcggaaggtgtacaccgtggaaacccaccaccgcaagatcatcaccgagaaccgcaagcccagcatcaactaccagatccaccgggactccatctgcaaggagtccttcttccccatcctgaagttcaaggatgacaagtacaagaagggcttcgatcagagcaactgcgccgacttcaaggccgaccagttcagcctgctgctggagaactccttcgtgcggcagacctccagcaacgcccactacgaggtgtggaacatcctgaagaaggactgccagcagttcctgatgaagatcgggagcgtgggcgccaactcccaggagcgcaagatcgccaagatcctggacaacctgacctaccagaccatcaagaagcccctggagaaggtgctggacaccagccggctgaagaacaagccgccccagaccgtgggcgacgccctggcctgctggcccgagtgcatcaaggagaaggacttccacaaggactccgtgatcctgcccgcctactacgagtggatgaagctgcaccggcacctgcaggaggccgacaaggagaaaaccttctacgagttcgtgaagaactgctccctgttcaagaacacccagagcacctccgaccacaacaaggtgcggaaggtgttctccctgccggtgcagatcagcatcggcaacatccggctgcagcggaagtcctgggacaagacccaggtgatccagatcgtggccgaggagtccctggccaagtacggctacgacggcaaggggcggccccacaccatcatctccaagaactccgtgcccaagaagcactacaccgggatccccgacaactggaacctggagcccctggagtggaagcgggtgcccgtggagaagatcaccctgcggacccccgacatcgaggtgaaggacgccaagatcaagaacaaggacgccgggcggtgcatggcccggctgaaggtgagctccatcaaggacctgagcctgccccaggacaagcgggactggaagggcaaggtgatctgccacgagagcgaggaggagatgaagaaggcccaggaccgggacaagaaggacaaccaccactgcctgtcctcccagttcaagtggttcgacacccccttcaccctgcagaacgaccggcgggaggtggagatcgaaacctcccccgacgggaaggtgatcaccttcaccatctccaagtccagcaaggtcaagagctggctgagcgcc

SEQ ID NO: 130 - DNA, 4080 bp, synthetic construct
  source 1..4080: mol_type = other DNA
atgaacatccgcaaggtggacaactacgccgtgggcctggacatcggcaccaacagcgtgggctgggccgtggtggacgacaagggcgagctgctcaagttcaagggcaagaacacctggggcagccgcctgttcgactccgccgacaccgcggcccggacccgcgcctaccgcacccagcggcggcggtacgaccgccggaagtaccgcatcagcctgctgcggaagctgatggaaaccgacgtgttcgccctggacgagaacttctaccaccgcatggagcagagctacctgtggcacgacgaccgggacttcaacgagaagtgggtgctgttcaacgacgccaacttcgacgagaagaagtactacgagacattccggaccatctaccacctgcgggacgccctggtgaacacccacgagaagatggacatccggctgatctacctggccctgcaccacatgatcaagtaccggggcaacttcctgcgggagggcgacctgaccgccgccgactccaacatcaccgccgccctgggcgagttccagatccagctgatggactactgcgagcggtacgggatcgtgtgcgggaccgtggacctggtggccatggccttcgcgatccagtccgggtccgagaagcgggccttccgcgccgagaaggtgcagagcgccctgggcttcaccggcgagtggaagaacatcggcaagcagctgagccgggccatgttcggctacgaggtgaactacgcctccttcttcgaggtggaggggaccgaggccaagttcgccctggacgccgaggagaaggtggagaagttcgtggacgaggtgctccccgaggacgacgcccccttcttcgagtccctgcggagcatcttcaacgcctacctgctggccgggatcctgaaggacatcccggagggcaagaccatctcctacgggatggtgggcaagtacgagcagcacaagaacgacctggacaccctcaagaccctggtgaagaagtacgtgcccgggcggtacgacgaggtgttccgcggggccaagtacgccgacggcgcctacaagcgggagaacgccgagggctacacggcctacatcctgagcgagaagaagctcagcaaggagaacttctacaagtacctgaagtccatcttcgcggacagcgagatgctgcccgaggacgccgacatctgggtgaccgtggaggccgccatggaggaggggaactacctgtccaagctgcggacccgggagaacggcgccatcccccaccagctgcacctggaggagatgcggaagatcatcgagaaccagggcgagtactggcccaccctgcgggagaaccaggagaagatcgaggccatcctgacccacaggatcccctactacgtggggcccctggggaagaacggggtgcccaaccgcaaggagcccttcacctgggccatccgggtggagggccaggaggacaccaaggtgaccccctggaacttcgacaaggtgatcgacaaggacgccagcgccgagctgttcatccggcggatgaccggcaagtgcagctacctgctgggcaaggacgtcatcccccggaacagcctgctgtacagcgagttctgcgtgcggcaggagctgaacgtgtgcaccatcgcgcgcgacggcgagcggccggtgcggttcgactgcgccgacatcgaccgcatcttcaacgaggtgttcaagaagcagaagcgggtgaaggtggacatgctgcgcgactggatccgcaccaacctgggctacatgaacaacgtgatccagggcacccagaaggagggggagttcgccagctccctgacctcctactgcgacttcacccggatcctcgggcacgagcccgagagcatctccgaccgggagatggtggagcagctgatcacctggatcacgatcttcgaggacaagaagatcctgaagcggaagatcgagcagaagtacggcaccctcgggcaggacatcttcgacaaggagcagatcaagcagatctgcaagctgcggtacaccggctggagcaagctgtcccgcgacctgctggagggcctgaaggccgactacaacggccaccgggtgtccatcatcgggatcctgcgggaccccgagggggcccggccccagaacctgatggagatcctggccgacgagcggttcggcttcagcgccctggtggaggccgagaaccaggagtacctgagcaacgtccggggcgcctacgagctggagaacatccccggcagccccgccatcaagcggggcatcaaccagagcctgaagatcgtggacgagatcgtgtccatcgccgggcacacccccaagaagatctgcgtggagatcgcccgcgaggagcagggcaaggggaaggggtcccggaccaagacccggtaccagatgctccagaacgcctacgactccctgagcgacgagctcaaggacgccgacatcagcgacctgagcatcaagctcaaggagcggtccagcgagctggacaaggagaaggtgttcctgtacttcctgcagatgggcaagtgcatgtactgcgggaagtccttcgacatctcctccctgaacgactaccacgtggaccacatcgtgccccagtcgttcatcaaggacgactccctggacaacaaggtgctggtgtgccggcactgcaacgaggagaagctggacacctaccccatccccgagtccatccggcggcggaacctgcggctgtggcaggccatgcagaaggccgacctgatctccaagcggaagctggacaacctgctgcgggaggacctgaacaaccggcagatcgagaagttcatcaaccggcagctggtggagacacggcagatcaccaagcacgtgatcgagctgctcaagacccggtaccccgacgccaccgtggaggccgtgaaggccgagctgacccacgacctgcgggtggagtacgacttccccaagtcccgggtcatcaacgactaccaccacgcccacgacgcctacctggcctgctgcatcagcaggtacgtgtccatccgctacccctcctgggagaaggagctggactacagcgccttcaagaagttcagcggctccgagaaggggcagcggaagggctgcaagggcttcatcgtgggcaccttctccatgaacggcttcgacaaggagacaggcgagatcttccgggacatctgggacgccgacgaggagctgctgaagatgcaccggtgcctgacctacaaggactgcttcatcagccgcaagaccgaggagctgaccggggagttctggaacgccaccgtgtactcccggcgggtggagactgacaaggccatccccctgaagaagaactccgaccccaagaagtacgggtactaccagagccccaacagcgcctactactgcctggtgacctacaccgagacagtgcggtccaaggccaagaccgtggcccggctggtgggggtgccggtgaacgtggcccgccacgtgtccgccagcggcgacctgcgcacctggctggacacccagtacgccgacgtggtgatcatcaagcccaagatcatgaagtaccagaagatcagctgggccgggtgcgagtactacctgaccagcaacagcgagatgatcaacgcccggcagctgtggctgccggagtcctacgtggtggggctggtggagtgcgagcacgccatcaagaagggccagatcgacctggccgtgtacgacgagactttcatcaagatctacgagcgggtgatcgacaccacggccgccgcctacccccggtacagcggcctgctgcagaagatcgagcacgtgtccgacagcttctacagcgccagcatcgaggacaagctgtcccggatcaacgagctgctggggctgctgcacgccaacgccggctgcggcctggtgaccaacgggctgacccccgccgccgggcggatgatgaacatcaactacggcccggccatgctggagggggagatcgagttcatcgacacctccatcaccggcatgtacgagcggcggtacagcctgggggtg

SEQ ID NO: 131 - DNA, 3453 bp, synthetic construct
  source 1..3453: mol_type = other DNA
atgctgaacaaggtgggggagatccagaagcggagcaagaagccctgcccgatctcccaccccgagttcgagctgttccgggcctaccagttcatcaacaacatcaagtacgggaagcaccccaagctgaccgacgatgagcgggagaaggtgctggccctgatcaacaagaaggacagcaacttcgacttcgccaacatccccaaggagctgaagctgacctacgagaagttcaacttcgaggacaaggccaaggtgcccgccaaccccaccatcaagaagctgcggcccctgttcgacctgaaggtgtgggagaagtcctacgaggagatctggcactgcttctacttctacgaggacaacgacatgctgttcaagaagctgaagaaggacttcgcctacaagaaggacgtggaaaccatcgccaagatcaagctgaaggagggctacagcaacatctccctgaaggccatccggaacatcatgcccttcctgaagaagggctaccagttcgaccgggccgtgatcctgggcgggatcaagaacgccttcgggaagcggtgggactacttcaccgagtaccacgacaagatcgagcgggagatcatcagcatcctgaacgaggacaacaaggacggggaggccatcgacaagatccgggaccacctgtccagccccgtgttcgcctacgggttcaagaaggacgacccctacttcacctacctgtaccaccacagccagaacgtggaggtgagcgacgagctggacgactacctgccgcaggtggagaacctgcggaaccccatcgtccagcagggcgtgaacgagacacgccggctggtgaactccctgctgcggaagtacaagcgcgagtacgggcaggacttccgcttcgagcggatccacgtggagatggggcgggacctgcggaacagcaagaagcagcggcagcaggtgagcatcagcatcgccaacaacgagaagaagaacaacgaggcccgggagcggctggccgagtacggcctgaagtcctcccgggagaacgtgcagaagttcctgatgtacaaggagatcgaggagcggaacggcaaggcccagtgcccctacaccggcaagaccatcgggatcaccgacctgctgggcgagtccaacgccatccagatcgagcacatcatccccctgagcatcagcctcgacgacagcttcgccaacaagaccctgtgcgaggcccacttcaacaacgagaagtccgagaaaaccccctacgagttctactgcatcaaccccgacgtgaagctgtggggcgcctcctcctgggaggaggtggagactcgggccttccggctgctgccctacgccaaggccaagcgcttcaccagcaagcgcaagttcgaggagtccaacttcatcgagcgccagctgaacgacagccggtacatcgccaaaaagacggtggagctgctgtcctgcatctgcaaggacgtgcgggtgatgcccgggcagctgaccgccgagctgcggcacctgtggggcctgaacaacgtgctgagccccatccacgagctgggcaagcacgagatcaacatcgacgagacaaagtccaccccctacttcgtggtgaccgacaagaacggcaacacggtcagcgtgcacaagaagtacaacgacgtgcccgtgaccaaggagagcgagatcctgctgcccgggtacaacgagaagtccaagttcaccaccaagtacttcgacatcaacatcgaggtgcccgagctgtccgacggcaagtactgggccaagctgcaggtgaacagccccatcaaggtgatccccaagtacatcgacaagcccctggccggcgaggaccagatcatcctgaagggccgggtggagaagggcaccttcaagaacgacaccgtcggcagcatcaccaacaaccaggaggacggcaactactgggtggtgttcgacatcgtgaagaagtccttcgtggcccccgagaagaagaaaacccccaaggccaagaagaaccagatcctgctgtacggcaacgtgtacaacggggagttcaagtgctacatctaccggtgcaacaccaacctccccgacggcaagttctggatgctgatcgactacaagcccgagaacatcgagttcatcaaggccgtgaacagcaagcccgagctgaaccacaacgagatctgcatcaacgccaccgccgacgacaacggcctgctggtggccgacgtggaccccgagtacaagatcaaggacagcttcgccagcggcaagtactacatgaccctgaagatcgagaagatccaccccgagctgtaccccatcgagaacgtgctgcccaaggtggagaaggaccagtccatcatcgagggcaacatctgggtggacaagtacaccggggacatcaagttcgaccccaagaagaaccgggacgaccaccggcaccacgccatcgacgccatcaccatcgccctgaccgagcagggcttcctgcagcggctgtccacccacaacgcccagcgcaagtccaagcagcgggagaagctggactccaccgagaagttccccgagccctggatcggcttcttcaacgacgtgaaggagaaggccaagggcatcctgatctcccacaagaaggacaacaagaccctgaccaagaacaggaaggggtacagcgtgcggggccagctgcacaaggagaacgtgttcggcaagcggaaggccccgcaggacaaggtggagtcctaccaccggcgcaccaagatcaccgagctgcagaacgacaagcacgtgggcaaggtggtggacatcaccatcaagaacctgatcgagaagtacctgtccgacaagtgcggcgtgaacatcgagaacaccaaggggtacaagatccccaaggacgccttcttcaagtacggggagtggcagctgtttctgcccaacaagaagggcgaccccgtgcccatcaagaaggtgcggatccgggagtccatcagcaacgccctgcccctcaagagcaacctgaaccagtacgtgaacccccggaacaaccaccacgtgctgatctacagcgactccgaggggaacctgtgcgaggacgtggtgcagttctggaccgtggtggagcggcggctccaggggcagcccatctaccagctgcccgacggcggcaaggagatcatggccaccctggagatcaacgacatgttcctgctggggctgtccaccgacgagttcgagctggtgaagtccgacaacagcttcctgtccaagtacctgtaccgggtgcagaaggtgagcagcagctactacaccttccgctaccacctggccagcaccctgatcaactccaaggaggagttcagcatccgcagcttcaaggcctggcaggacaccaaccccatcaaggtgaagatcaacgagctcggggagatcgaccggttc

SEQ ID NO: 132 - DNA, 3258 bp, synthetic construct
  source 1..3258: mol_type = other DNA
atgacctggcgcctggggatcgacctgggcaccaacagcctgggctggtgggccttctccgtggagaaggagggcccccggtggcgggtgtccgacagcctggacgggggcgtgtacatcttccccgacgggcgggagcccgccaagaagggccgggtgggcgactccaacgccgtggagcgccgcctggcccggtccctgcgccggaaccgggaccggcgcaagacccggctgcgggccttcatgcgggacctggtggccctggggctgatgcccgtgagccgccaggagcgggacgagctgttccaggcccgcaagggcgaggacagcgaccgctccaacccctaccggctgcgggccgaggccgtggaccggcccctgggcccctacaagctggggcgggccctgttccacctcggcctgcggcgggggttcaagtccaaccggctggagcaggccgacaaggacggcggcaagctgaaggagcgcatggacgagctgcgcaacaccctgaacggcaagaccctgggccagttccagtgggcccgcttccaggtggagcgggagcgccagcagtccggcgagaagcccagcggcatccgcttccggggcgagggggagttctaccccgaccgggccatgtacgccatggagttcgacgccatccggaagaagcaggagccgcaccacagcctgaagcccgacgactgggacaggctgcggaaccggtacgtgctgttccagtggcccctgaagcccgtggagcgggggcgctgccagttcttcctggaggaggcccgccactggcgggacacccccatcgggcacgacttccggatctaccaggagctgaacatgctgcggtgggtggacgccgaccaccaggagcaccccctgagcgccggccagcgcagcgccgtgctgcagctgctgctgacccggaagtccgaggtgaagttcgacagcctgcggaagcagaagtgccaggaccgcaccctgctgttccccgactgcacccgcttcaacctggagagcaagaagcggaaggggctgaagcaccacgccatcggggccaccctgaccgagaaccccaagctgagccccctgtggcagcggcggtgcagcgacaagggggacgacgggctgctggacgacatcttcgaggccctgcacgaggaggacgacaccgacagcctcggcagccggctggccgagatgggcctggacgccgaggccgtgcaggagctgatcgagtggccccggctgagccgggccacggccaacgtgagccggcggttcatggaggccatcgtgcccatcatgcgggaccagaagctgctgtactgggaggccgtgagcgaggtgaaggaccgcaacggcgccccgctgcggcactcccagcagcccgagggcgggcactacgacaccctgccctactacggcgaggtgctgcacggcagcaccctgggcgccaaccccgccgccgacccccagaccgcccccgagcagcacttcgggaagatcaacaaccccacggtgcacgtggccctgaacagcctgcgccgggtggtgaacaccctgaccgagcgctacggggagcggcccgtggagatccacgtggagctgtcccgggccctgaagcggacccggaccgagcgcgacgaggacgccaagcagcaggccgacaaccagaaggagaactgccgcatccgggaggagctgaccaagcacggctccgcccagcccagcgcccgggacatcaagaagtacaagctgtgggaggagctgggcaaggacaccctggcccggtgctgccccttcagcggccaggtcatcagctgcgcccagctgctgaacggggaggccgagatcgagcacatcctgcccttcaagcggaccctggacgacagcatggccaacctgaccgtggccatgcggtgggccaaccgcctgaagggcaacaagaccccctacgaggccttcgcctccaacgcctacgccgccaagggcatcgagtgggagggggtccggacccgggccgaccgcctgcccgacaacaagaagtggcggttcggccccgacgccatggcccggttcgagggcaagcccgggtccggcttcatcgcccggcagctgaccgacaacgcctacatcgccagggccgccaagcggtacctgaactgcctgaagggcgtgaagcagatcgtgcccaaccggggcgggctgaccgccctgctgcggcggaagtgggacttcaacagcatcctgtccgacaccgcctacaagagccgggaggaccaccggcaccacgcggtggacgccgccgtgatcggcctcgccgaccgggccatgctgaacagcgtgtccaagcagaccgcccggggcgccgacgaccgggtgcacattatggtgcccgagctgcccgagcccatcgagcacgccatccgggcccgggtgcccgagatcgtggtggccttcaagcccgaccacgggtggcagggcgccatgttcaaggacagcgcctacgggttcatcccgctggagcagcgggacccggacatgctggagcacaacctggtggtccggaagtccctggccgagctgaccctgaaggagtgcggcttcgtgcaggacaagaaggacaagcggatccgctacgtggtgggctgcatctgcgacgagcagatccgcagcagcgtgggcgcctacctgacccaggccgccgagaacggcgaggacctgaagaaggacgccatcctgaagaaggtcctcgcccggttcggcgccgagcacggcatcggccgggtcaggatcctggtgaccgaccagaccgtgaagcccatcgccagcgccccctacaagggctacaagcccgacagctacgtgtgctgcgacgtgtggcggtgccccaagggcaaggccggcaagtggcagcacgagcggtacgagtggcggggcgtgtactgggcctacgcggaaacccccaacggggtgcccgcgccccagacgcggaagccccaccccgccgccaagctggtggcccggctgtacaagaacgatatggtggcctacgaggagggggagcagatccgcgtcatgcgggtggcgggcttcagcaccaccaacaacaagctggacgtggtgtcccacagcgccgccgaccccaagcagagcttcgtggccatcaacgccctgggcgtggccgggctgcggaagctgtgggtgtcccccgacggccgcgtgaagggcagcacccgc

SEQ ID NO: 133 - DNA, 4215 bp, synthetic construct
  source 1..4215: mol_type = other DNA
atgaagaagatcctgggcctggacctggggaccaactccatcggctgggccctggtgaacgagagcgagaacaagaacgagttctcctctctgatcaagaccggggtccggatcatccccctgtccaccgacgagtccaacgacttcgagaaggggaaggccatcagcatcaacgccgaccgcacgatgaagcggtccacccggcggaacctgcagcgctacaagctgcggcggaagcagctgctgaacgtgctgaagggcaacaagctgatcgacaacaagtccgtgctgacggagatcggccccaacagcacccacagcctgctgagcctgcgggccaaggccgccaacgaggagatctccctggagaacttcgcccgcgtgctgctggccatcaacaagaagcgggggtacaagagcaaccgcaaggccaaggacgacaccgacggccaggccatcgacggcatgcacatcgccatccagctgtacgagcagaacctgacccccggccagttcgtgtacgagcggctgaagcaggacaagaagaacatccccgacttctaccacagcgacctgcagaacgagttcgacgccatctgggagaagcagaacgagagctaccccgacatcctgaccatcgagctgaaggagtccctgaagaacaagaacaagggccagagctggaagatctgcgagaagcccttcaacatcgtgggcatcaagcagtccggcaacacccagcagaagaagctggagctgtacaagtggcgggcccaggccctgaaggagaagatcgacctggagcacctggccatcgtgatccaggagatcaactcccagatcaacaactccagcggctacctgggcgagatctccgaccgctccaagcagctgtacttcaaccgcatcaccgtgggggagtacctgtacgagcagatcaggaacaacccccacaccccgctgaagaaccaggtgttctaccgccaggactacctggacgagttcgagcggatctgggagacacagtccaagaaccgcaaggacatcctgaccaacgagctgaaggagcagatccgggacatcatcatcttctaccagcggcggctgaagtcccagaagggcctgatctccatctgcgagttcgagggcctcgacatcgagatcgagatcgacgggaagaagaagaagaaaaccatcggcccccgggtgatccccaagtccagccccctgttccaggagttcaagatctggcagatcctgaacaacctgaagttcgagaacatcgagactcacaccatctaccccatccccgagctggaccaggacctgtccatccggaagcagatcttcgacgtgctgaacaccaagggcaagctgagcccccgggaggtgctgaacaccgtcctggagaaccccgagaagtggaaggtgaagaacttcaaggagctggaggggaacagcaccaaccagaagctgttcaacatctactccaagatcgtggagctgagcggccaccgcatcaacaacaagaacctgaaggagtcctacgccgacatcttcaagaccatcgggatcaaccccgatgtgctggagttcgacgccgagctcaagagcaacctgttcgagaagcaggccagctaccagctgtggcacctgatctacagctacgagggcgacaacagcgagacaggcaacgacaagctgtacaagctgctgtacaacaagttcggcttcgagaaggactacgccaagctgctgatcaacatcagcttccagaacgactacgggaacctcagcaccaaggccatcaagaagatcctgccctacctgaaggccggccacgagtacagcgaggcctgcctgctggccggctacaaccacagccacagcatcaccaaggaggacaacgagaagcggcccctggacgacttcctggagctgctgcccaagaactccctgcggaaccccgtggtggagaagatcctgaaccagatgatcaacgtgatcaacgccatcatcgagcagtacgggaagcccgacgagatccggatcgagctggcccgggagctgaagaagtccgccgaggagcgggccgagatgacccggcagatcaccaaggccaccaccgagcacaacaagatccgggagaagctgaaggagatctaccccttcaacaccgggatccggatcacccagaacgacatcatcaagtacaagctctgggaggagctggccttcaacggctacaagaccatctacaccaacagctacgtgcccatcgagaagctgttcaccaaggagttcgacatcgagcacatcatccccaagaccgtgctgttcgatgacagcttctccaacaagaccatcgccgtgcgggacttcaaccgcatcaagtccaacaagaccgggatcgacgccgtggccgagaagtacggcaaggactccaccgagttcaagcggtacatcaacaccgtggagaagctgtacgagaacaacaagatctccaaggccaagtacaagaagctgctgatgaccgccgacgagatccccgacggcttcatcgagcgggacctgcgcaacagccagtacatcgccaagaaggcccaggagatcctgcggaagatcgtcaagaccgtgacccccaccacggggaacatcaccagcaagctgcgggaggactggcagctgatcaacgtgctccaggagctgaactgggagaagtacgccaagctggacctgaccgacttcgagatcaacaaggagggcaagaagatccccgtgatcaaggactggtccaagcggaacgaccaccggcaccacgccatggacgccatcaccgtggcgttcaccaagcccagcctgatccagtacttcaactacctgagcgcccggaagaacgagaagcacaagaagcactccaacatctacgccatcgagcagaaggaaaccttcgtgaacgacaagaacaagcggctgatcaagccgcccatccccatcgaggagttccgggccgaggccaagaagcagctggagagcatcctggtgagcttcaaggccaagaacaaggtggtgacccggaacatcaacaagaccaagaagaagtccggggagaacaagaagatcgagctgacccccagggggcagctgcacgacgagacaatctacggcaagagctgccggtacaccaccatcgaggagaaggtgggctccaagttcaccaaggactacatcaacaacgtggccatcaagagccagaaggaggccctgctgaagcggctgaacgagttcgacggcgacgccaagctggccttcacggggaagaacagccccagcaagaaccccatctacctggacgagcaccagagcgtgaagctgcccgagaaggtgaagttcgtggtgctcgaggagcggtacaccatccgcaaggagatctcccccaacctgaagatcgacaaggtgatcgacaagaagatccgggagatcctgaacaagcagctgaagcagttcgacaacgacccccagaaggccttctccaacctggaggagaaccccatctggctgatcaagcccaccgagaagaacaagtgggagaaccccgacaagcccaagagccacgagctggggatccccatcaagcgggtgaccatcaccgggatctccaacgccgaggccctccacaacaagaaggaccacctggggaacaagatcgccgacaacaacggcaaggtgatccccaccgacttcatcagccccgggaacaaccaccacatcgccatctacaaggacgaggatggcaagctgtacgaggacgtggtgtccttctacgacgccgtgacccgggtgaaccaggggagccccgtggtgtggcacacccacccggagcaccccgactggcagctgatgttcaccctgaagaagaacgagtacttcatcttccccgaccccgagaaggggttcaacccctccgagatcgacctgatgaacgaggagaactaccacttcatcagcccccacctgttccgggtgcagaagatcagctccaagaactacgtgttcaaccaccacctggagacacaggccgtgaacaacgacaccctgaagaacaagaacctggccaagaccacctacaacttcatccagacccccgagaagctgaaggagctgatcaaggtccggatcaaccacctggggcagatcgtgaagatcggggagtac

SEQ ID NO: 134 - DNA, 3195 bp, synthetic construct
  source 1..3195: mol_type = other DNA
atgatcaccaccaacggcatgaagtaccggctgggcctggacatgggcaccaacagcatcggctgggtggccgtgaagctggacgaggacggccggccctgcggcgtgctgggcatgggggtgcggatcttccccgacgggcggaaggactccgccagcggggacggcccctccaacgccgagcagcgccgcatggcccggggccagcgccggcggcgggaccggtacctgaaccggcgcgccgacctgatgcaggccctgatcgactgcgggctgatgcccacctacgaggccgagcgcaagagcctggagaagctcgacccctacgagctccgggcctgcgccctggacatgaagctgccggcccaccacgtgggccgggccctgttccacctgaaccagggccgcggcttcaagtccaaccgcaagaccgagaagcgggagaaggacaccggccccgtgaaggaggccaccaagcggctgtccgaccagctgagcgccagctccgcccggaccctgggcgagctgctgtaccggcggcggtccatggacgagccggtgcggttccggaacaggaaccagggcaccaacctgaaggccgagtacgagctgtaccccacccgggagatgatcctggacgagttcgacaagatctggaaaacccagaagaagcaccaccccggggtgatgtccaacgacgccaagaagcggctgatgggcatcatcttccggcagcaggacaccgccccgcccccggtggggaagtgcaccctggaccccgccagcgacgacggcgacgccgaggggttcaggtgcgcctggagccaccccctggcccagcggttccgcatctggcaggaggtgcggaacctggaggtgcaggaaaccggcctgcggtggcgccggctgtccaaggaggagggcgacaaggtcgcccaggccctgctggagcagaacaccgtgagcttcaacaagatccggcggatcctggagctgccctccgggatctacttcaacctggagagcgagaagcgccagaagctgatgggggacgagacagccgccaagctgtctcacaaggacctcttcggcgaggcctggcgcaagctgcccctggaccggcagatcgagatcgtggacctgctggtgggggacaagagcgacgacgccgccaaggagtggctgacccgccacaccgacctgtccagcgaggccgccggccgggtggtgtccgccttcctgcccgaccggcactgccggctgggcctgcgggccatccggcggctgctgccccacatggagggcggcctggactaccccagcgccgcccgggccaccgggtacgaccacgcccgggcccccaccggggagctgagccccgacggccggctgccctactacggggagtggctgaaggaccacctggccggcagcggggaccccaaggacccgcccgacaagcggtggggccggtaccccaaccccaccgtgcacatcggcctggggcagctgcgccgggtggtgaacgccctgatcggcgagtacgggaccccgcaccagatcgtggtggaggtggtgcgggacctgaagcgcagcaagaagcagcgcgagaacatccggaaggagcaggccgccaaccagaagaagaacgaggcccgcgaccgcgagatccgggacctcgccctgcggccctcctacgagaaccggctgcggctgcgcctgtgggaggagctgaaccccaagaacgcctgcgacaggcgctgcccctactccgggcagcccatctccatcgaccagctgttctccgccgagatcgagatcgaccacctgatcccctggcaggacagcctggacgacagccccgccaacaaggtggtgtgcttccggggcgccaaccgggagaagggcaagtccacgccccacgagaagttcggcaagaccccggagtggaagggcatcgcccagcgggcctccaagctgcccccgaacaagcggtggcggttcggggccgacgcccgggagcggttcgacggccagggcggcttcctggcccggcagctgaacgagacagcctggctggcccggctgtccaaggagtacctgagcgccgtggtgcggccctacaacatctgggtgacccccggccggctgaccagtatggtgcggtacaagtgggggctgaacgagctgctgcccgggtacgaccgggaggccaagaagcggaccgaccaccggcaccacgccatcgacgccctggtggtggccatgaccgaccggtccctgctgcagcggatgtcctccgcctacgacgagacacggtcccgcatcatcgtgccctccccctgggagggcttccgggagggcgtgcagcccttcctggagcggatggtggtgtcgtacaagcccgaccggggcacccccggcaagcgggggtccacctccgggcagctgcacaaggagactgcctacgggctgatcgagttcagcgaggacgggcccagcaaggtggtggtgcggaagaagatctccgagttcaagaagcggagcgacatcgacaccgtgcgggacgccaccctgcgcgccgccctgctggagctctgggacaaggtgcactgggagggcggcaaggccgacgacttcgccaagatggccggcaccccctccgccctgggcgggggcctgcagcccgtgcggggcgtgcgggtggtggagaacatgaacgtggtggccatccgcgacaaggacggccggccctacaagggctacaagcccgacagcaacaccttcgccgacatctgggagatgggcgacaagtccaagtcctggaagatcgtggtggtgtccaccttcgacgccaaccagcccgacttcaacatcgagaagttccgccccaccaccgcccggggcaagcaccggggcaagcccgaccccgccgccaagcggctgatgcggctgcacaaggacgacatgtgcgccctgggcagcggcagcgaccgccgcatcgtgcgggtgcggaagttcgactccggcaccatcgtgttcgactcccacaacgagtcgaacgtggacgcccgcgagcgcaagggcgagatggaccgcaacaagtccatctacagcgccaagcgcctgcgggaggagggcttccgcaagatcggggtggacgagatcggccgggtgcgggaccccggccccacc

SEQ ID NO: 135 - DNA, 3249 bp, synthetic construct
  source 1..3249: mol_type = other DNA
atggccgccaacgacatgcggtaccggctgggcctggacatgggcaccaactccatcggctgggccgccgtgcggctggacgacgacggcgagccgtgcggcatcgtggacatgggggtgcggatcttccccgacggccgcaaccccaccgacaagacctccaacgccgtggaccggcgcatggcccggggccagcgccggcggcgggaccgctacctgaagcggcgggaggacctgatcggggccctggtggagtacgggctgatgcccgaggacgccgaccagcggaagcgcatcgccaacgacaacgagcggttcgacccctacgagctgcgggccaaggccctggacggccagctgacccccttcgagctgggccgggccatcttccacctggaccagcggagggggttcaagagcaaccgcaagtccgagtccggcgacaacgaggacgaggcccagaaaacccggtccgacatctcccggctgcgggagagcatggaggagagcggcgcccggaccctgggcgagtacctcgccaagcggcggggcaagggcaagtccgtgcgggcccggcccggcgaggggctgtaccccgaccgggccatgtacgaggaggagttcaagcggatccgggccgcccaggaggtgcaccagagcctgtccgccgagcagtgggacaagctgcgggaggtgatcttcttccagcggcccctgaagcccgtggaccccggctggtgcctcttcgaggaggaggagcagcgggccgccaaggccctgcccctcttccaggagttccggatgctgcaggaggtgaacaacctgaagatccaggacggggtggaggaccgcttcctcaacgtgggcgagcgcgggcgggccctgcgccgcctgcggctgggctccaacatcaacctgaacgtggacaagcccctggccagcctggggctgcccagcggggccaagttcaacctggccgccgggggccggaagcgggtgaccggcgacgagacaaccgccaagctggccgccctgcccaagaaggccaccaccaagcggcccgccacccccggcatgttcgggaagcggtggctggagttcagcctggaggagcggaacgagatcgcccgcttcctcctggacaccgaggaccccgaggtggcccgggagcgggccgtgcgggagtggggcctgagcgacgcccaggccgtggccctctccaacgtgagcctggtgagcggctacggcaacctgagcgagaaggccatccggaagatcctgccccacctggagaagggcctgggctacagcgacgccgtgatcgccgccggctacccgcaccactccgacttccggaacgaggaggcccacgagcggctgccctactacggcgagatcctgacccgggacgccgtgggggccgaccccgagaaggaccccgagatctacggcgagcccgcccggtacgggcggatcgccaaccccaccgtgcacatcgggctggggcagctgcggcgggtggtgaacggcctgatccaggtgtacgggaagccggaggagatcgtggtggagctggcccgggacctgaagatgaaccgggccgacaagctgaactaccagcggtcccagaaggagggcggcgagcggaacgagcggttcgtggagatgctgaagtccatggaggagcccgtgacccaccacgtgctgcggaagctgcggctgtgggaggagcagggccctccccagaaccgcatctgcccctacacgggcaagcagctgagctgcgagatgatcgtgaccgcccgcacggagatcgaccacatcctgcccttctcccggaccctggacaacagcgtgtccaacctggtggtgtgcatggccgaggccaaccgggtgaaggggaacaacaccccctacgaggccttcgggcagaagaacccgcccgggtacgactacgactacatcctggccaacgtggccgacttcccctacaagaagcggcggcggttcgagaaggacgccatggactggttcgagggcgagcgggacttcctggaccgccagctgaacgagactcagtacctgtcccgcacggcccgcacctacctggcccacctctacaacgagaaggccgaggggtcctaccgggtgttcgccatccccggcaagatgaccgccctcctgcgccgggggtgggggctgaacggcatgctctccgagagcggcgaggagcagaccgagcggaagcagcgggacgaccaccgccaccacgccatcgacgccttcatcgtggccaacaccacccagcggctgctgcagaagttcgcccgggaggccgggtccagctggcaggacgccgccgagcggctggccgagctgacccccaagccctgggacggcttcggccggaacgagctgcggcccttcctggacaagatggtggtgtcccaccggctggaccgcggcacccggggcgtgatgggcaagaccaccgggcagctgcacaacgacaccgcctacgggatcatcaagacctccgaggacggctcctccgaggtcgtgcggcgcaagccgctgagcgacttcaagtccaagaagcacatcgaggccgtgcgggaccccgccctgcgcgacgccctgaaccagctgtgggacgacctcggcggcaaggccaccgagttcgccgagcacgccgagcgcaagggcgtggtggtgaacggccgcgtgcagaaggtgcggcgggtgcgggtggtcgagaagcagcgggtgatccccatccgcgacagcgagggcaaggcctacaagggctacctgcccggcggcaacgagttcgccgacatctggcagatgcgggacggcagctggcgggtggtggtggtgcccaccttcgacgccaaccagcccggcttcgacatcgagaagttccggcccctgaccaccaagggcaagtacaagggcaagcccgacccctccgccaagcgcctgatgcgcatccagatcgacgacatgggcgccctgggggaggggtcggagcagcgcatcgtgcgggtgcgcaagatgagcaactccaagtccggggccctggtgtggctggacgaccacaacgaggccaacgtggccgcccgcgtgggcaagcgggagatccgggacatgaagtacagcgcccggcagctgcaccagcacgggttccggaaggtccgggtgaacgagatcgggaaggtgatccgggaccccgggccctactcctcc

SEQ ID NO: 136 - DNA, 3273 bp, synthetic construct
  source 1..3273: mol_type = other DNA
atggtgaagtacgtgctgggcctggacctggggcccacctccatcgggtgggccgccatcgccatcgacgagaacgggaacttcctggggttcctgaagatcagcgactccaaggacggcctgcactggatccccgccatcaacagccggatcttccccatgccctacgtggagaaaacctactgcgccggcaacaaggagacaacccggaacaagaaccggcgggacgcccggggcgccaagcgccgctaccagcggcgcagccagcggctgaacgagacatactgcttcctgcacgagcggaacatcctgcccgagcggaacgagtacgagaagctgctgagcctggaccccttcgagatccgggccaaggccctggaggagcggatcgacctgcaccacgtgggccgggccatcatgcacatcgccaagcggcggggcttcaagtccaacagcaagctgggcggcctgatcgacgtggacaccgacaacaagcggaagaagaaggacaagtccaagatcaccctgctgaacacctacgagggcaagaccatcggccagatctgctacgagaagcacaaggacgacatctgcaccgccgtgcggaacaagggcgagatgaacatctggcagcggaaggactacatcgacgaggtgtgccgcatctggaagtgccagcagcagtactaccccaccatcctgaccgacgacgtgctggaggacctggtgagcgaggacgggagcaagtggctcctgttctcgcagcacagctacaagctgagcgcccgcaagcagcggaagtacatcgggaagtgcagcctctggaaggagaagctgcgctgcgacaagtccaagcgcgtcgcccaggagttcgtgctgctgcagaccatcaactacctggagatctacgactcctacgggagcaagatcgagtgcggcgtgtccaaggaggacaagcagaagatcctggagtacatctcctccttcgagaaggggaagaagtactcccagatcaagaagcacctcgggtaccccgaggactggcgcttcaacttcgaggacgtggaggaggacaactccctgcccggcatcgccgtggacgacctgatccgggtcatcttcggcgagcgcaagggcaacaagtacgtgcagatcgtggactactccgaccgggaggccgtgtgggagatcgtcctcctgtacatcgacgaggagatctcctacaacgagctgcgcaagcagatggtgaagttcgacgtggaggtgcccgacgaggacatcctgaacgccaagctgtccaaggccaaggtgcccgacgggcacgtgaagtactgcgaggagatcgtgaagatcctgaacgccgagatgctgaagggcatcaacctccacgaggccaagcagcgcgtgtgcaagcgcctggggctgaagaacaacagccgggtgctgagcaagctgcccatcccggaccgggcccacggcttcgagactaccaaccccaacgtgaaggtggtcctgcacgaggtgcggaagatcgtcaaccagctgatcaaggagttcggcaagcccgagcggatcatgatcgagtgcgggcggtccatcaaggccaacaagaagcagcgcgaggtgatcaagaagaagcagaaggacaacaacaccctgaagaagtccgtgcgggagatcttcgacgtgaacgaccagatccccgccttcatcaagtgcaacaagcccggctgggccatcaagcgctacatcctgtggcagcagcagaaggggatgtgcccctacctggactccagcaagaagcagatccccctgtccaagctgttctccagcgaggtggagatcgaccacatcatcccccgggagatcagcttcgacaacagcctgaacaaccaggtggtgtgctacaccaacgagaaccgcaacaaggggctgaacacccccatctcctggctgaaggagacaaaccccgagaagtgggtgaacacccagaacgccatcaagcactggaaggagctgaccaagcgggagaagatcaccatcgacggcgaggagatcaccctggagcccaaccgcaacaagtgggagcggttcttcgtgaacaacaaggacgtgcacaacaagtactcccccaagaacctgctgaacgacaacagctacatcgccaacgaggtgaagaagtacctgctgcggctgtaccccagcgagaaccagcagggccgccagaacgtggacaccaccaagggcatgatcacctccgagctgcggaagatctggggcgtgaactccatcctgcggaaggacgacatcgaccagaagaaccgcggcgaccaccggcaccacgccatcgacgccgccatctgcgccgtgaccacccacagcgagatccagaagatcacccgggagctccagcaggccttccccgagacagactacggcaagatcaagatctccaagccgtggtctggcttcgagcgggacctgaaggaggtgatcgacagcatcaacgtgagccaccggccccgccggcaggtgcggggcagcctgcacggcgacagcttctgggccaaggactccaacgggaagttcgtgcagcggaagaaggtgaaggacgccaacgtgtccaccgtgtgcgacgagaaggtccgggacctgatcaagaagtggaaggagtccaaccagagcgagtaccccatgctgcccaacaacaaccacaacgtgaacaacggggagcccatccccgtgaagaaggtgaagtgctacagcggcaagaacgagaaccagttcatcgagatccggcccggcaagtacgtggagaagcccgagaaccaccacgtggagctgttcgagctggaggagaacggctccacccagatcatcgccaagatctggaacacctacgaggtgtccaagcggatcgccaacgcgaaccgcaagtacaacaagctggccaagtccggcgagaagctgaacatgaccaactgcatcgtgatccgggagcaccccgagtacagcgaggccaccttcaagttcagcttctccaagggggacatcatccagatggactccaagaagggcggccgcgcgtactaccgggccgtgagcatcggggagaacgactactggttctgggagctgcacatcgccagcaacgagaagcccaaggccgacgacctggacggccaccggctccggagccccaacaagttcctggagctgaacgccaagaaggtgaccgtggcccctctgggccgcgtgcgctgggccaacgac

SEQ ID NO: 137 - DNA, 4845 bp, synthetic construct
  source 1..4845: mol_type = other DNA
atgagcaagcggcagtccgtgatctcccccatctccatcgacctgggggccaagaacacgggggtgtacttcgcccactactccgccggctcctccgtccacgacatcgagaagtgggggcgggtgtaccggctggagaaggacgactacaccctgctcatgaccaagcggacgatggcccggcaccagcgccgcggctacaagcggcgcaagatggtgaagcggctgttccgcctgatctggtgccaggagttcggcctgaagtgggacgactccgtgcagcagaccgtgagcttcctgctgaaccggcgggggttcagctacctgaccgacgagttccacaccgagttcctggacgagttcccgaaggaggccttctgcgagctccccgagaacatccggaacgagctgcaccactacagcaagatcaacgagagcctgttcgagtggaagcagctcggggccaaccacgtgatcgacctgctgagcgagctcagcgagaagccccagaagatcaagcgccggctggtggtgatcagccgggccaaggagctcaagacccactgcgagtcccgcatcgaggggaacgagatcgagggcaacaagaagcggaactccaagctgcgcaagctgagcaagtgggtcgtggagtcgtgggtcagcgagggcatccgctgcgccgacgccatcgacgagaaggccaacgtggtggacatgatcctgtacctggaccagatcgagctggagaaggtcaagacgatgctggagagcatccccatcgacgagcacgagtccgaggccaaggagctgcgcgcctccctgtggaacttcgacatcgggaagttcgacctggagaaggccgacttcgagaagaacttcgtgcgcagccacatccaccacttcgccttcgccctgaacaagatcaaggacgagctgaccagcggggcccggcaccggtccaagtacttcgaggagatccacgacgtgctgagccggaacaaccacacccaccggtacctggccgagttctgcaccaagctgcagaactgcgagtacaccagccagaaccgcacccccatcaccgtggcctcgctgagcaagctcatcgggcacctgtccaacctggagctgaagcccctgcggaagtacttcaacgacgtgcagcacaagcacgaggactgctgggacggcgagcggctgtccgagctgttcggccgctggatcctgaaggagtggcgggtggacctgaccaaggaccgggacaaggccgagggcaagcggggcgactaccgcaacctgcgggacaagtggaagtcccacgggtccggcgtggtggacttctggctgcaggaggacccccacctgaccatcccgccctaccaggacaacaacaaccggcggcccccgcggtgccagagcctggtgctgaaccccgtgttcctggacgagaagtacgagcgctggcagtactgggtgtccgagctgaccagcctcatcgaggtgaacgagtacctcaaggactaccagaccgacctggggtccctgaagtccggcaagggccggttctacttcagcgacgaccagctggccggcaaccgcaagatcgacgccggccggcggacccgcaaggacctggacgcccgggtcctgcagttcatcctggacagggtgaaggccagcgaccccctcaagctgaacgagatcttctcccacgtgaagaagatccggcagctgcagagcacccccgaggagaagaagatcgccacccggaagctggaggacagcatcaagtgctccaagctgccggacgagctcaagaccaagcggcactacaagaacgagggggtgttcagccggggcagcttcctgcacctggtgtgcaactactacaagaaccggcagaaggcccgggacggccgcctgttcatccaccccgagtaccactacgtggagaactgcggcttcacccggaccggccggttcgagagcagcacccacctgctgacctactgcaaccacatcccccgccacagccacaaccagctggtggagaacctggccgccctgttcgccctgagcccccagcagctgatgcagcggaccaacagctccaccaacaaggacctgctggactggctggagcggatcaagggcctgaagtccaactgcgagaaggccgccaaggagcagaaggtgcggcggggccggctcaaggaggacatcctggccacccaggaggactccaagagcgagctggggaagctgaaggacaagtccatcaacctgtccatccagctgtacgaccagctcaactgcaaggtgggcgactccacctccaaggaccccgtggccagcgtgttcctgctggcccagatcaacaacatcgccttcagcgacagcgggggcaagtccaagacctgcgccgtctgctccctggacaacgcccggcggatgcagttcgccagcgacagcgtgcacgcccagcggctgcccgccatccccacccggctgatcgacggggccgtgatgcggatggcccgcatcaccacccacgcgatcgccaaggacaagtgggagacaatcgaggacaacctcaagaaggggatgaccgtgcgggtgcccatcatcaccgagagcaaccggttcgagttcgagcccagcctgaacgccctgaaggggcgcaagagcgaccccaacaccagccgggtgtacagcaagcaggaccgcatcaagtccgccgccggcaacatctccccctacagcggggagactgtgggggacgagggcgacctcgaccacatcatcccccgcagccaccccgagtgggggaccctgaacgacgaggccaacctgatctacacctccaagcaggacaaccgggacgtgaagggcaaccgcatctacaccctgagcgacctgcacgagaactacaagctgaccgtgttcaacctgtccgagagcaccgagatcgccaactggatcgagacaaccatctgggacgccgagaaggaggacttcaagttcggccagtacttctccttctccggcctgaacatcgaccagcagaaggccttccggcacgccctgttcctggagaacgggaaccccatccgggaggccgtgctgggcgccatcaaccaccgggccaagaccctggtgaatggcacccagcgctacttcgccgaggtgctggccaacgagctgcacaagaaggcgaaggccatcaacaagcaccacctgctgagcttcgactacttcggggtcgaggctcaggacaactcccgcggcgacgggatccacaacctgcgggaggacctggtgaagttctaccggcaggacctggacgtgttctccaagaaggacgacgagccccaggaggcctacagccacctgctggacgcgcaggtggccttctgcatgatcgtggacgcccaccgggacgacggcgggctccgcatcgacctggaggacatcgggatctggtcccgggtggaccgcaacaccggggagatccagaccggcaagaaccgcaagatctacgggtccgagctgttcgacgccatcgaggtgaagcccaaccagatgcgccgcatcaacctgaagcggtaccccctggagcagaaccgcttcagccaccgcatgatccaccgggacaccctgtacgccgagcactacctgcccatcctggtggaccgggagacatccaagatccggatcggcttcgactggaagaacagcttcgagctgaacgagtccatcaccaaccggcagaacctgtacttcgccctgaagttcaaccccaagaccaaggacatgaacctgaccaaggacgagtccttcgaggacctggtgaaccggctggagcagatcgggaactggaagaagtccggcaccaacttcctgtgcctgcccctgcggaagcagatgatccacaactactacatcgagaacttcaacaccgccaacggcatcagcgggaaggaccaggggtccggcttcaagttcctgcggaacaagctggcctaccgcaccgagcggaagcggatcaccaccctgaaggaggccaagatcatcctggaccgggagtccaacttccagctgcccaagtcccagtccgggctggtgctgcccgtgaaggaggagtggaagaagctggtggccgcctggaagcggaagccggagtccaccgaggactccgagttcctgagccgctacttcatcaagaaccccgacaacaagcccagccacgagaagttccggaccgagttcagcctgcccatcaagaccccgcacggcaagatcctggtcaagcggaacagctgggacgacagcttcatcttccagatcctgaacgacagcgacccctccggggccaaggccttcctgcccgtgttcaagaacggcaagctggccaagctgctgagcaacagcgccaacagcagcaacgtgttcctgttcacccaggagaactactacagcgaggccaccggggagatccggagcttcgaccccgacaagtggtacgctgtcaacctgagcgagaacgagaaggtgcaggggatcgagagcctggagtaccagatccccgacaacacccggcccgtgatccgggtgaagttcagcgagtcccggaacggggacgacgtgggggagatcctgaagtcctccagcctgcaccccctgctggcccccaggctgccctccttcaaggacaaggacaaggagaacctggccatccagcagctgctggaggagctgaaggagaagctgtcccaggggaagcccctggagtacaagggcgccagcttcagccgcgagatcaagcggaagctgagcgagatcctg

SEQ ID NO: 138 - DNA, 3060 bp, synthetic construct
  source 1..3060: mol_type = other DNA
atggcctacgtgctggccctggacatcggcatcgccagcgtgggcctgagcggggtggactaccccaacgaggacatcctgttctgcaactcccacgtgttcgacgccgccgagaaccccaagaacggggccagcctggccctgccccggcgggagaagcgggggcagcgccgggtgatccggcggcgggccggccgcaagaaggccgtgcggcggctgctgagccagcacggcctgcgggacatcgacgtgatcgacgccagcaagtccagcaacgtgctgtgcgtgtgggagctgcggaaggaggccctggagcgcctgctgaacgacgccgagttcgtgcgggtgctgttccacatcgccaagcaccggggcttccagtccaaccgcaaggaccagtccgagcggaacgacatcgagggcatgaaggtgctgaccggggccaaggagctggaggaggccatgatccgctccggccgcgagacagtgggcgcctacatcagcaccctcgacaagaagcgcaacggcgacggggactactcccggatggtgacccgggacctgctgcacagcgaggtgaagtacatcttcgacgcccagcgcaagtacaagaacgacaaggccacccaggagctggagcacgagtacgccgccatcgccttcacccagaagcccctgcgctccagcgcctggatggtgggggactgcaccctggagcccgccgagaagcgggcccccaagcactcctacaccgccgagctgttcgtgctgtggtccaagctgaacaacctgaagatccggaccaccgggaagggcgagcgcttcctgacccccgacgagaagaacaagatcaccgccctggtgcacgcccacaagaccggcgtgacctacaccaggctgcggaacaccctgagcctggaggaggccgagcggttcaacatcggctaccgcaagaccaagaaggagcaggacagctgggagaagatccgcaaggccaccgaggccgggaagttcttcgtgctggacgggtaccagaccctgaaggaggtgctcgccgactccgacatcgactggcagaaccgcctgcagaacaagcgcgagcagctcgacgaggccgcccggatcctgtccttctacgaggacgagaaggagatccgggacctgctgtcccaggccggcttctccgagaaggagcaggaccggctgctgaagatcaccggcttcagcaagaccgtggacctgagcctgaaggccatccggaagatcctgccccacatgatgcagggcctgacctacgacaaggcctgcgacaaggccggctacgacccccacggggccgccggcgggcagaagggggacaagctgccccctttcgaggacatccggaacccggtggtgaaccgggccctggcccagtcccggaagatcatcaacgcctgcatccggacctacggcatgcccgagacaatcatcctggagttcggccgggacatcggcaagagcaagcaggaccgggacaagatcgagcgcaccatcaagcagaacgaggcccaccgggaggaggccaagaagcacttcatcgagctgaccggccaggccgaggcccggggcggggacatcctgaagtaccggctgtggcaggagcaggaccacacctgcccctactgcggcgtgtgcatcagcggggacgagttcaaggaccccctggccacccagatcgaccacatcctgccctactcccggaccttcgacgacagctacatgaacaaggtgctgtgccacatgcagtgcaaccaggacaagggcaaccgcaccccgttcgagtggctggggcagaaggccatctgggacaaggtggaggccctgagcgcccacctgcccaagcccaaggccgaccggttcgtgatggaggtgctggacgaggaggggttcaaggagcggaacctgaacgacacccggtacatcgcccggctcctgaagtccctcctcgagaagcacctggacatgggcgagggcaaccgcatccagacccggaacgggcggctgaccgcccacctccggcggatgtggggcctgcagaagtcccgggacaccgaccggcaccacgccctggacgccatcgtgctggcctgctccacccagagccacgtgcagcggctgtccaactggaaccggtacgaggccaagaagggcaaggccgagccctacgcccccaagccctgggacaccttccgggaggacgccctggaggccgtgtcccagatcttcgtgagccggctgcccgtgcggaaggtgaccggggccgcccacgaggacaccatccgcagccagcgggccaacggggagatcgtgcagcgggtgaagctggccggcctgaagcccgacatgctggagcggctggtggacaaggagcggaacaccgccctgtacaccgtgctgaaggagcggctggacgcccacgggggcaagcccgagaaggccttcgtggagccggtgtacatgccctgcaaggaccccggcaagcagggccccaagatcaacgccgtgcggatcgtgaccaaggagaagtccggcatccccatcaacgaggggatcgccagcaacggcgggatggtccgcaccgacgtgttcgagaagggcgggaagtactacctgtgccccgtgtacgtccaccagatccgcaagggcaagggggccctgcccaacaaggtgatcaccggcaaggaggagaaggactggaccgtgatcgacgacagctaccggttcctcttctccatgcacaagaacgacctgatccgggtggtgaagaaggacggcaccaacgccttcggctactaccgcaccaccgaccgctccggcgggaccatcaagatctgcgcccacgacaacgacagctccttcggcaacaaggggctgatgaagatcggggtgcagaacctgaagtccttcgagaagtacaccgtggactacttcgggaacaagtcccgggtgcggaaggaggagcggaacggcatggcctacgccgccgacagcgagtccggccagaccctggccgtggag

SEQ ID NO: 139 - DNA, 3264 bp, synthetic construct
  source 1..3264: mol_type = other DNA
atgaagtaccggctgggcctggacctggggtccaccagcatcggctggaccgtcctgaagctggacggcaagggggagatcttctccctcgaggacatgggctcccggatcttcagcgacggccgggacgcccagtccaagaagcccctgaacgtggcccggcgggagcaccgcggggcccggcggaacaactaccgcaagttcaagcggaagtccgagctgctggaggtgctcatcaagcacaacatgatgaccaccaaccgcgaggagcagaagatcgtggccaacaagaacccctacaagctgcggaagcgcggcctggacgagcggctcagcctgtacgacttcggccgggccctgttccacctgggccagaagcggggcttcaagtccaaccgcaagtacgacaaccaggaggccgagaagtccaacatgaaggtggccatggccgacttcaagaacaagctggccaagtccaactgccggaccatcggcgagtacttctgcgacaagatcgagaacggcgagcgggtgaagatcaccgtgagcaacgtgggcagcaagaactcctactcctacgtgctcaaccgggagcaggtggaggacgagttccagaagctgtgggtggcccaggccaagttccacagcgagctgaccgaggagatcaagaacgagatctaccacgccatcttctggcagcgggacctgaagccccaggagaagggcaagtgccagttcgagcagggggagccccggatcgccaaggcccaccccctgttccagctgttccggatctggcaggaggtgaacaacctgaagatcatcaccttcgaggggaagaagcaggacctgaccctcgaggagaaggtgaagctggtgcagaagctgagctcccagaagtcctgcaagttcagcgccctgcgcaacgagatcttcggccgggccctggccaacaactacgagttcaacttcgagaagtccgagagccgggacggcctggagggcaacctgaccttctccatcttccggagcgagaagtgcttcggggccgagtgggacaagttcgacctgcccacccagaacctgatcgtggagaagatcctgaacgaggagaacatcaaggaggtggagaagaacctggtgtcctggctgtccaagacctacgacgtgagccaggagaaggccgagtacatctccagcgtcagcctgccctccggctacgccaacgtgtccaagaaggccatcgagaagctgctgccctacctggagaaggggctgcagctgcacgaggccatcgaggaggtggagtacaccatcaacaactacgacggcaccctgtacgacgagggcaacctgccctactacggggaggtgatgccccaccacgccctgttcggcaacggggatcagaaccagatccccgagatctgctacggcaagatcggcaaccccacggtgcacatcgtgctgaaccagctgcggaccatcgtgaacctgctgtgcaagaagtacggcgcccccaagcagatcgtgatcgagctggcccgggagctgaagctgagcaagaagaagaacgacgagatcaacgagactaacgagaagaaccgcaagtccaacgagaaggccgtggccttcctggccgagcacggcctgcccaagaacaaggagaacatcatcaagtacaagctgtgggtggagctgaacgccaaggacgacaagaaccggtgctgcccctacaccggcaagaacatcggcttcaccaccctgttctccaacaaggtggagatcgagcacatcctgcccaagagccggaccttcgacgactcctacgccaacaagaccctgtgcttccggcaggccaacctggacaaggggaaccggtccccctacgaggccttcgggcagaactccatccccgagtacaactggaagaacatcatcgaccgggtgaaggagaacctgcccaagaacaagcagtggcggttctaccccgacgccatggagaagtacgagggggagaaccccatcatcgcccggatgctgaacgacaccaagtacgtcagcaagatcgcccgggagtacatgcagtacgtgtgcggggccaacaacgtgtggaccatccagggccagctgaccgccaagctgcgccaccactggggcctgaacagcctgatcgccgacgacaacaacaagaaccgggccgatcaccggcaccacgccatcgacgccttcgtgatcgcctgcaccacccggggcatgctgcagaagatcttcacccaggtgcgggagtcccgggaccggctgatcgagaagatgcccccgcccttcgagaacttcaacctgtccgagatgcagagcctggtggacaacatcctggtgtcccacaagcaggaccggcacggggccaccaagcacatccggaagaacctgcacgcctggaacaaaaagaccttcggcgagctgcacaaggccaccgcctacggcctgtacggcgccaccatcctgctgaagaacctgaagaaggaggacctgccgtacctgatccacaacgagcactacccccagctccgggactacctggaggggaagatcaagtccaaggacgtgcccaagatcgacatcatcctgcggttcaacaagaccttcgacctgtacaagtccagcctgatcgaccgcatcaagaagatcagcctgagcatccggcggcccatcaccgagatccggagcaacgagatcgtgtgcaacaactacatccgggagatcctgagcaagaagtccaacaacagcgagaacctgaccaagctggggatcatccgggtgaaggtgttcgacgactccatcgaccccaagaccgtgatccccatctacgacaagaacgggatcccctacaagtacttcgtgtccggcaacaactactgcctggacatctacatgcccaaccggggcaccaacgccggcaagtggcagatggaggtgatcagcaacttccaggcccaccagaaggacttcaagcccaactggaagatcgccgagcccgaggccaagctgatcatgcggctgttcatcaacgacatcgtgaagtacgaggacgaggaggagaaggagatcattgggcgcgtgaagaagatggatcagcaccgggcctacatcaagaacatccggatctccgacgacaccgacggggtgtcgttcagcatctccaagttcatcaagaccaaggcccggaaggtgtacatctcccccatcggggagctgtacgagccc

SEQ ID NO: 140 - DNA, 3129 bp, synthetic construct
  source 1..3129: mol_type = other DNA
atgcccctggtgttcggcctggacatcgggaccacctccgtggggttcgccgtgatcgactacgacagcgagctggccacggggaaggtgcaccggctgggcgtgcgcatcttccccgaggcccgggaccccaagggggtgcccctgaaccaggagcggcgccaggcccggctgcggcgccggcagctgcgccggcgccgcgagcggcgccggctgctgtccgagcacctgtgcgccgccgggctgctgcccacccgcaacagcagcgagtgggagtgcgccatgaagcgcgacccctacgacctgcggcggcgcgccttcgagggggaaaccctgagcccccacgagatcgggcgcgccatctaccacctgatgcagcgccggcacttcaaggggcgggacatcgacgaggtgtccgacaccgccgactccgccggcgacgacgccgacgacaagcaggccacctccgcccgggagctgaccgggcaggccctgaagcgggagggcaagaccctgggggcctggctggccgcccggggcccccacgagcggaagcggggcgagcacgccacccgctccctcgtggaggacgagttcgacaaggtgtggaagcccctgatccccgagcccttccgcagcctggtgcgcgacgtgatcttcgtgcagcggcccgtgttctggcggctcaagaccctgggccgctgccgcttcgtgcccgaggccagggtctgccccaagggctcctgggtgtcccagcagcggcgcatgctggagaagctgaacaacctggccctggccgggggcaaccagcggcccctggaccccgacgagcggcaggccatcctgagccggctgcagacccaggccagcatgacctgggccggggtccggcgggccctggcgcccctgtacagggcccggggcgagcccggcgaggagcgcgccctgaagttcaacctgcaggagggcggggagaaaaccctgctgggcaaccccgtggaggccaagatcgccgacatcttcggcaacgagtggcagaaccacccccggaagcaggagatccgggacgtgctgccacaccagatctggcaggccgactacgaggaggtgggcggccagcgggtgatcatcctgcccaagaccgagcgggtgtcccggcgggccgcggtggtgcggaacttcgtgtccgagttcagcctgagcgacgcccaggcctccaagatcgagacaatgaagctgcccagcgggtgggagccctacagcgtggaggccctgcaggccatgctgccctacctggaggagggcgtgcgcttcggcgagctcatcaacgggcccgactgggaggactggcgggccgaaaccttccccgggcgggagcagcccaccggggaggtgttcgaccgcctgccctcccccgcccagcgggaggagtccgagcacgtggccgggctgcggaaccccaccgtggcccggacccgcaacgagctgcggaaggtggtgaacaacctgctggacctgtacggcaagcccgacctgatccgggtcgaggtggcccgggacgtggggaactccaagcggcagcgcgaggagaaggccaccggcatccggcggcaggagctgcgccggaaggccgcccgggagaagctgcagcagtacggcatctccgagcccagccgggccgacgtggagaagtggatgctgtgggaggagtgcgggcaccagtgcccgtacaccggcgacttcatcagcttcgacgccctgttcaagaccggggacttcgacgtggagcacgtctggccccggttccggagcctggacaactccttccggaacaagaccctgtgccggaaggacgtgaacctccagaaggggaaccagaccccctacgagttcttccggggcaaccaggaggagtgggacgccatcgccaaccggctggccaacatgaaggccagcaagtcccgccccgggatgcccccggggaagatccggcgcttcctggcccggagcatccccgaggacttcgcggcccggcagctcaacgacaccgggtacgccgcccgggacgccgtgacctacctgaagaagctgtggcccgaccaggggcccgacgcccctctgaaggtgtccgccgtgtccgggcgggtgaccggccacctgcggcgcctgtgggggctgaacaacatcctggccgactccggcgagaaaacccggagcgaccaccggcaccacgccatcgacgccctgacggtggcctgctgccaccccgggatgacccagaagctgtcccggtactggcaggaggaggacgacccccgggccacccagcccctgctgccgccgccctggaaaaccatccggagcgacgccgagaaggccgccgccagcatcatcgtgagccaccgggtgcggaagaagatcagcggccagctgcacaaggccaccgtgtacggcgacaccgacgaggaggtggagggcggccgcggggtgacctaccgcaacttcgtgcggcggaaggccgtggaggtgctgaagaactccgaggccccgcggttcaacggcacccggatcatcgacatcgtggatgacggggtgcgggacatcatccggagctgggtggagcgccacggcggcgacccctccgccgccttcgtgcagggctaccccaagcgcagccggaagggccccgagatccgcaaggtgcggctgcgggtcaagcagcagatcgagctgatgaccaaggccagcaccggcttcgccgacctgggcaacaaccaccacatcgccatcttccggctgaccgacggcaccatcgactacgaggtggtgtccctgctggaggccagccggcggaaggagcggcgggagcccgtggtgaagcgggtgcgggacaacggggcccggttcgtgatgagcctgagccccggggacagcctgcagctgacccggaacgtggagacacggctcaagatcgtgaccagcgtgtggtccgagggccgggtggtgctggtggaccacgacgacgccaagggcaccaccgagttccggcccggggccaagaccatcgtgagcaacggcggcaagaaggtggccgtggaccccatcggccgcatccggcccgccaacgac

SEQ ID NO: 141 - DNA, 3204 bp, synthetic construct
  source 1..3204: mol_type = other DNA
atgtcctacatcctgggcctggacctgggggagacatccgtgggctgggccgtgctggaggagcgcggcaacaagcccgtggccctgaaggacgccggggtgcgggtgttccccaagggggccgaggtggacgagaagcgggggatcagcacctccgagtctcagacccggcggcagaagcggtcccagcgccggatcatccggcgccggagcgaccgcaagaaggccctgaagaacctgctgctgagccacgccctgctgcccagcgacaacgagaagcaggagtccctgctgcaggccgacccctacgagatccggacccggggcctggacaccaagctgcggcccaacgagatcggccgcgccctggtgcacatcaaccagcggcgcggcttcaagtccaaccgcaagagcggggacctgaaggaggagggcatcctggccacctccatcgggaccctggccaaggccatggaggagtcccaggcccgcagcttcggggagtacctgtaccggctggacagcgggtacgacaagggggcctccaaggagaacacccgggagcggcagggcgtggccctgcggaaccggggcggcgggtacgagcacctgccgtcccgggccatgatcgaggacgagttccacctgctgtggagcgcccaggccgcccaccaccccggcctgctgaccaaggacctgaagcgggccgtggagggcatcatcttctaccagcggtcctacgccatcagcgaggaccgccgggccagctggggcaagaagttcgtgaacgccaagatggcgccccagctgaagcactgccccctgttccccgaggagtaccgctccccggccgggacctgggaggcccagcgcttccgcctgctgaaggaggtgaacaacctggaggtgctggacgagtacggcaagggccggaagctcgacaccgccgagcgcaagacgctggtggacgccctgggcatcgaggagaagcagaccttcgtgcagctgagcaagctgatcgccctgcccaaggagcaccgcttcaacctcgaggccggggagcggaagcacctggacggcaacaagttcgaggtgcagctgatcaagggctactacgggaagaaaaccaagaaggagaaggaggcctggctggccctggacggggacttcaagggccacctgcgggagctggtggccaacgtggaggacgccgaccagttcaccgagactgccaaggagctgggcctgaccgagaagcagatcgaggggctgcggaccgtgcagcccaccgggaactacctggcctacagctacaaggccatccagaacctgctgcagttcctggaggacggcctggacgagtaccacgccatccagaaggcccgggagcagggcgtgatcccgccctccaacgagcccgacgagtacgacctgctccccctgccgccggacctgcccaaccccatcgtgacccgggccctgcacgagactcggaaggtggtgaacctgctgatcaagacctacggcaagcccagccgcatcgtggtggagctggcccgggaggtgaagcacggccccaagcgccggcagagcatctcccggaccatcgaggagaaccgcaagcggaacgagaaggtgaaggcctggtaccgcgagcacggggtgctgacccccacccgggacgacgtgatcaagtacaagctgtgggaggaccagaaccacctgtgcgtgtacaccggcaagaccatcgaccaggaggacctgctgagcgaccagaacgtggtcgacatcgaccacatcctgccccgcagcaggtccttcgacgacagctaccgcaacaaggtgctgtgcgtcacccaggccaaccgggagaagggccagcgcctgcccgtggagtggctgggcgggcccgggaacgagcggttcgacaagatgctggtgcggctgaagaacatgcccagcatcgggcacgacaagttcgcccgcttcaaccaggagaagatcgacaccgagcacgccatcgcccggcagctggtggacacccagtacatcagccgcgaggcggtggcctacctgaaccagctgttccccaaggagctgcgggtgggggagaaggccgtgggcaccgtgatcggcaagctgacctccgacctgcggcacgtgtggggcctgaacaccatcctgagcgggcaggaggacctgaagaaccgggaggaccaccgccaccacgccctggacgccatcgtggtggcctgcgccacccggaagcacgtccaggagctggccaagcggtccaagtgggggcaggacccctccgaggtgcccccgccctggaagcgcttccgggacgacgtgaagcatatggtggactcccggaagcgcacctggaagctgggggaccaggagatcaccacggaggggatgctggtgtcccaccgggccgagaagaagatcctgggcggcttccaccaggagacaaactacggccccacgcgggaccccgagtggttcgtgcggcgggtcggggtccgctccctgaccgggcccatgatcaagggcatccgggacgacgccatccggcggatcctgaccaagcactgcgaggagaacgggtacaaccccgagcaggacggccggaccatcccgcccaaggtgttccagaccctgcccacgatgccctccggcgtgcccatccgcagcgtgcggatcgtggagcgcaagcagaagggcatcgaggtgttcggcgggaagaacggcatcgccccgcgggccgtcctgctggggaacaaccaccacctggagatggtggagcgggacaacaacggggtgaaggagatgctggtgtgcatcgtccccaccctggaggccgcccgccgctcccgcatccgcaaggagcccatcgtgcagcgggaccacggggagggcatgaccttcaagctctccctggcccgcaaggaggccgtggtgttccacaagaacgggaagcaccacctgtgctacatcagcaagatgagcggctcctccaccctgagcaagggctccgggtccatggacctgaccttccggctggacaaggacgcccggcccgccggggagggcaacaagagccccttcgcccgcatcgtgtccttcaaggcctgggatgagcactcccccatcaaggtggccgtggaccccatcggccgcctgtccaaggccaacgac

SEQ ID NO: 142 - DNA, 3195 bp, synthetic construct
  source 1..3195: mol_type = other DNA
atgagcacctgcgccgagcccagcgacagctacgtgctggggctggacctcggcgtgagctccctgggctggagctgcctgaacgtgaccaccgagcaggccttcagcatccgctgcgtgggcgtgcggatcttcgaggccggcgtggacgggtccatcgagcagggcaaggactccagccgcgccaccgtgcggcgggagaagcgccagccccggcgccagatcgagcgccggagccggcgccagcggaagatcttccgcatcctccagcgccaggggctcatgcccgacggccccagcaccgaccaggtgcagatcgaccggctgatcagcgacctggaccgcaccctgcggacccagctgctgaagcccggcgaccacatcgccgcccaggtgtggccctacaagctgcgggccatggccatggaccagcacctggagccccacgtgctgggccgggccctgtaccacctggcccagcggcggggcttcctcaccaaccgcaagaccgacaaggacgacgaggagagcggcaaggtgaaggccggcatcgccgagctgtcccgggacatgggcaaccagaccctggggcagtacctggcgagcctggaccccgacaccgtgcggatccgccagcggtggaccgcgcggcagatgtacgaggacgagttcgagaagatctggaccgcccagcagacccaccaccccaagctgctgaccccgcggttcaagcggaagctggagcaggccatcttcaagcagcggccgctgaagtccagcaaggccctgatcggccggtgccagctggagcccgaccggcggaaggcccagctggccagccccctggcccagcggttccggctgctggccgccgtgaacaacctgctgatctacgagcccgacggcaagcagcggaccctgaccgccgacgagcggaccaagctgatccaggccctggagcggagcggcgacctgaccttcgccatgatccgctccaagaagctgctggacctgaagaaaacccacaagcggaaggacaaaaagaccggcaagcaggtggtcacccccggctacgccttcaacctggaggagggcggggagaagaagatccccggggaccgcaccgccgccaagctggtgcccatcttcggggaccggtggttcgacttctccctgcggcagcaggagcagatcgtgcacgacctgctggagtaccagaaccccgacgccctggccacccgggccaaggacaagtgggccctgaccgacgagcaggccaacaccttctccaaggtgcggctggagcagggctacgcccgcttcagccgccgggccctgcagcgcctgatcccccacatggaggaggggctgcactacatgaccgcccagaaggacgagtaccccgagtccttcgaggtgcaggaaacccacgacctgctgccgcccgtgctggacgccatcaaggacctgcggaaccccgccgtgtgccgggccctgaccgagctgcggaccgtggtgaaccacgtgatcaagacctacgggatgcccacgatgatccgcctggagatggcccgggacctgaagcggccccggaagcagcgcgagcaggcctggaagcggaaccgggaccgccagtccgagcgccaggtggccgccgccaagatcaaggcggccaagctggtggtgggggagcccaaccgggacgccatcgagaagtggctcctggccgacgagtgcaactggctgtgcccctacaccggcaagaccatctccgccgaggccctgctgggcccccacccccagttcgacgtggagcacatcgtgcccttctccatcagcctggacaacaccttcatcaacaagaccctgtgcgacagccacttcaaccggcacaggaaggccaacaagctgcccaccgcctgctacgaccccgacgggcaggagtggcaggacaccctgagccgggtgcggcggttccgggggcaggcctccagcatcaagctggagcggttccagtggaccgaggtgcccgacgggttcaccaaccgggacctgcaggacacccggtacgccagccgcctggccggggagtacctggccctgctgtacggcgggatggtggacgccgacggcaagcggtgcatccaggtgagcgccgggggcgtgaccgccaagctgcgggacgtgtgggggatgaacggcatcctgaacgacggcgggatcaagacccgggacgaccaccggcaccacgccgtggacgccgtggccatcgccctcacgtcccccgccaccgtgaagatgctgagcgaggccgccaccaaggcccactccgccggccggcaccggttcgcccccgccaacgagccctggcccgacttcatcgacgacctgcgggacgccatcgacagcatcaacgtgtcccaccgggccgaccggcggatcagcggcccgctgcacgccgagacaaactactcccggcccatcagcgcccccgggggcaagctggtgacccggaagcgggtgcgcctggaccagctgaccgtgaagaacatcgagagcgacgccatcgtggacccctccgtgcgggacgccgtgcggaccaagtggcacgcgctgggccggggcaaccccaagcagatcttcgtggaccgcatcaaccacccctacatgcagacccaggacgggcggatcatccccatccacaaggtgcgcatcaccgtgaacgacaagccccggcagatcgggagcggcacccggaagcggtacgtgatctccgggaaggacagcctgcaccacacggtgatcgtgtccagccagctgaagaacggcgagaagtggcgggatgagcccgtggaccgcatggagatgcaccggcggctgagcgccagcccctgcgtgcccatgatccagaccgactgggggaccgaccggttcgtgatggccctgtgcaagggcgactgcatcgagatgaacgacaagaaccacaaccggtccctgttcatcgtgcggtccatcagcaaggcggacatcaccatccgcctgcacaccgacgcccgcaccgacgagcagatcaagctcgccggggagcggagcaagtaccgcatccgctccgccgacgagctgcggaagcggcgcgccgtgcgggtggtggtgggccccctgggcgacatccaccgggtgaagatcggccacgtg

SEQ ID NO: 143 - DNA, 3258 bp, synthetic construct
  source 1..3258: mol_type = other DNA
atggccgccaagcagtccaagtaccggctggggctggacatgggcaccaacagcatcggctgggccgccgtgctgctggacgacagcggcgacccctgcggcctgctggacatgggggtgcggatcttccccgacgggctggaccgcaccggcgagtccagcaacgccgccacccggcggaaggcccggtccagccggcggacccggcagcggtacgtgaagcgccgggacgagttcatggccctgatggtgcagcacaacctgatgcccaccgatcaggccgagcagcggaagctggagactctgaacccctacgagctccgggccaaggccctgtgccccgagaagctgcccgcccaccacgtgggccgggcgctgttccacctgaaccagcaccggggcatcaacctgaaccgccggaccgagaacggcgacaaggagcgcggccccgccaagggggccgccaagaagctgcacgagtccatgaaggccgacagcttctccaccctggggcagttcctgtaccaccggcagtgcatcggggagcccgtgcgcttccggaaccagggcaccaccgagaagcccaagtacgagctgtaccccacccgccagatgatcctggacgagttcaacaagatctggaaggcccagacgccccaccaccccgacgtgatgaccgacaaggccaaggaggccctgtacaaggccatctccttccagatcgaccccgagtccccgccggtggggaagtgcaccctggaccccgccgtggaccccgaggacaaggacggcttccgctgcgcctgggcctaccccctggcccagcacttccgcatctggcaggaggtgcggaacctggaggtgcggctgccgggccaggccagccggcggctgtccaaggaggagggcgaccgcatcgccggccggctgctgaagcagaacaccgtgtccttcaacgggatgcggcagctgctgcggctgcccaccgacgcctacttcaacctggagagcccccggcgggagaagctgcagggcgacgagacagcccacaagctctccaagaaggagttcttcggggagagctggcggaagttccccctgcccaagcagacccagatcatcgactgcctgctgggcgagaacgacgaggacttcgtcgtgcagtggctggagcggcacaccggcctgaagcggaacgccgccgagcgggtgtccagcgccctgctgccccagggccactgccggctgggcctgcgggccatgaagaagatcctgccccacatgaaggaggagggcctggactacgcccaggccgccaaggccgcggggtacgacccccaggtgcccaccgacgagctgagccccaccggccggctgccctactacggggagcggctggggaaccacctgctgggcaccggcaaccccgacgaccaccccgagaagcggttcgggcggttccccaacccccgcgtgcacgtggggctggggcagctgcggcggatcgtgaacaccctgatctccgagtacggccggccccagcaggtggtggtcgagatgacccgggagctcagcctgtcccagaagcagcgggaggcccgcgagaaggagcagaccgccaaccagaagaagaacgacgcccggcggaagaagctccaggagtgcgggctgcctcccaaccaccgcaacatgctgcggctgcggctctgggaggagctgaaccccgaggacgccctcgaccgccggtgccccttcaccggcaagcccatccccatgtcccagctgttctccaagcaggtgcaggtggagcacctgatcccttggcaggacagctgggacgacagccccaccaacaaggtggtgtgcttcaccagcgccaaccaggccaaggggaagaacaccccctaccaggccttccacgaccaccccgactacgactgggacagcatcctgaagcgggccagcaagctgcccaccaacaagcggcggcggttcgagaaggacgccggcgagatgttcgcccggcagggcggcttcctggcccgccagctgtccgagacaggctggctggccaggatgagccgcgagtacctgaccgccatcgccagcgacgtctgggtgacccccggccggctgaccgggctgatccgctaccggctcggcctggaggacctgctgcccatcaagtgggccggcgacgccaagcagcggaacgaccaccgcaaccacgcggtggacgccctggtggtggccctgaccgacgacagcctgctgaacaggatgtccagggcctacgacgaggagcggtccaagatccgggtgcccctgccctggcaggggttccgggaggaggtggaggcctgcctggacaagctgatcgtgagccacaagcccgacttcgggaagcggcagtccgagggcaacaccaccgggcagctgcacaaggagacagcctacggcctgatcgagttccgggaggacgccccctccaaggtgatccaccgcaagccgctggccgacttcagcgagcgggacgtgcagaacgtgtggtcccccgagctgcggaaggtgctgaagctcgtgtgggacgacgtggagctggagctgaaggccgccggcgccgagcagaccgaccgcggcaagctgaagaaggccagcgacaagcggcggctggccgcccgcttcgcccagcgggtggccaccgggggcgtgatcgtgggccagaagctgcagtaccccaagcgggtgcgcgtgaagtccaacgtgcggcacctggccctgatcgagcacaaggactcccggggcgtggtgcacgagaagggctacgagctgaagtccaacgagttcgccgacgtgtggtggatgcgggacgacagctggcagatggtggtggtgcccaagttctacgccaaccaccccaacttcgacatcgaggacttccgccccaagaccgccaagggcgagcacaagggcaagcccgaccccaccgccaagcggctgatgcgcctgcacatcaacgacatgggggccctgggcaagggccccaacccccggatcgtgcgggtgcggaagatcaccgacgccacgaaggaccccttcgtggtgctggacgaccacaacgaggccaacgtgcccaaccgggtgggcaaggacatgcgggagaaccgctactacgcccacaacctgaaggaggagtgcttcaggatcgtgaaggtcgacgccatcggccgggtggactaccccgagcccttcaagccc

SEQ ID NO: 144 - DNA, 4578 bp, synthetic construct
  source 1..4578: mol_type = other DNA
atgaagaacatcctgggcctggacatcgggaccaacagcgtgggcttcgccctcatcgaggagaacgagggccagtaccagcgcatcatcaaggccgggtcccggatcatccccatgggccaggacgagatctccgacttcaacaaggggaacaccgtgaccgccgccgcccagcggcggcagtaccggtccatgcggcgcaacaagatgcgccgcaagctgcggcgggagcggatccaccgcatgctgcacagctaccagatgctgcccgcccactacgacatgagcatcgggtgggacaagaacgacgccaagcactacgggcagttcctggaggggctggagcccaagctgccctggatcccgatcaacaagaaccagtccaagttcctgttcttcaaccgcttcgagaacatgctgcaggacttcaagcgggtgcaccccgacttcgacaccgagaacaagaagatccccctggactggaccatctactacctgcggaagatcgggctgacccagaagctcaccctggaggagctggcctgggtgatcctgcagttcaaccagaagcgggggtactaccagctgtccatggacgacgccaccgacgacgccaccaagaagcaggagatcaaggagctggaggtgctggacgtggaggacctggggatcaacaagggcaagcgggagtaccgggtggtgctgcccgagggcctggagcagatcgtcaagtccaaccagcccctgaactggaagggggagatccgcaccttcatcgtgacctggacggtggacgccgagggcaacaagcagaccgacaaggagggcaagatcaagtactccatcaagcagctggaccccgaggccgccgacgcccccttcgccctgatcaagcagtacaccgagatccagatcgaggacagcgggctgcacgtgggcgagtacatctacaacagcctgctgcacaaccccgagaagcccatcatcgggaagctggtggccaccatcgaccggcaccactaccgccgggagctggaggccatcctgcaggcccaggtggccttccaccccgagctgcaggaccacgccctgttcgacaaggccgtggaggagctgtaccccaacaacagctcccaccggctgagcctgcaggcccaccgcagcttcgtgaagttcgtggtggaggacatcgtgttctaccagcggcccctgaagtccaagaagtccaccatcagcaactgccccctggaggcccgggagtacatcgacaaggagacaggggagttcgtgaccgtgcccatcaagtgcatccccaagagccaccccctgtaccaggagttccgcctgtggcagttcgtgtacaacatccgcttcaagagcgtggagatcacctccaagaaggacagcgacgtgaccgcccagttcctgtccacccccgcccagtacgccacctacttcgactggctgaacaccaaggactccatcaaggggtcccagctgctggcctgccccagcttcaagctgaagcccaaggagcggaaggcctacgagtgcaactacctggaggacaagacctacccctgcaacaagaccgccgccctgtactacaagctgctgaagaaggccggcatcgacgtggaggtgctggaggagatcgagtccaactggatgaccaagctgtggcacatcctgtacagcgtgaccgacctggagcagcgcgagaaggccctggactcctacgcggagaagatgcagttctccgtggaggacaccagcaacttcgtgaccgtgttcaagcaggcccaggccggcgaggagggctacggggcctacagcgagaaggccatcaagaagctgctgaccctgatgcggaccgggtaccactgggacctgtccagcaacgacaaggtgctgagcgtggtggaggagtggctggagacaggggagtgccccaagtacaagaacctgagcgacaacctgcgggagcaggccaccagccaggtgaccagccggggcttcaaggaggtgaacgacttccagggggtgcccttctgggtggcctcctacatcctgtacgggcgccactccgaggccagcaacgccaagaagtggaagaacacccgggacctggacgtgttcctggccgagttcaagcagaacgacatgcggaaccccgtggtgcagaacatcgtgcgggaaaccctgctggtggtgcgcgacctgtggaaggcctacgaccacatcgacgagatccacgtcgagctgggccgggagatgaagaactccgccgacaagcggaaggccatgaccgcccggatcgaggagaacgagaacaagaacctgcgcatccggcggatgctgcaggagttccagaacgccagctacggcgtggagcaggtccgggcccacagccccatgcaggccgaggccctctccatctacgaggagggggccatcgccaacgggggcgagatgcccaaggaggtgttcgccatccacaagaagctggcggacagctccaaggtgcccaccgcctccgagttcatgcggtacaagctgtggctggaccagcggtaccagagcccctacacggggcagatcatccccctgagcaagctgttcacctccgcctacgagatcgagcacgtgatccccaagtcccggttctacgacgactccttcaccaacaaggtgatctgcgagtccgccgtgaacaaggacaaggacaacatgctggccatggagtacatccagagccggcaggggaaggagatcgcctgcggctccaagctggtgcccatcctgacccccgagcagtacgagcaccacatcaacgaggtgtacgggcgccggaaccggctgaaggccgagaagctgaccatcaccgagatccccgacagcttcatcgagcggcagctgaacgacacccggtacatctccaagtacgtgatggccctgctgagcaacatcgtgcgggaggacggggaggagacaagcaccagcaagaacctgatcccctgcaccgggggcatcaccacccggctgaagaaggactgggggctgaacgacatctggaacagcctgatcgcccccaggttccagcgcatgaacgagctggaaaagaccaacgcctacggcgagtaccgggaggtggacggcaagcggttcttccagatcaacatccccctggacatcgccaagggcttcaacaagaagcgcatcgaccaccggcaccacgccctggacgccatcatcgtggcctgcgccagccggcgccacgtgcagttcctgaactcccaggaggccaagtccaaccccaagaaccacgacgccctgaaggaggccctgatggtgtccaagggcaagggcaacggcaagggcctgcgcaccccctggcccacgttcaccaaggacgtgctggactgcctgcagaacatcgtgcccagcttcaagcacaaggcccgggtggtgtcccggggctccaactacaccgagtacatcgacgccaccggccgcaaggccaccaagaagcagaccaagggcgacctgtggaccgtgcggaagcccctgcacaaggagacaatctacgggcgggtgaaccgcctgatccaggaggagctgcccctgaagaaggccctggaccacatcgactggatcgtggacaaggagttcgccgccttcctgcaggagctggtggaccagaagaagaagcccgccgccatcgtcaagaccgtgaaggagcacgagaagtacgagcagtacgccgtggccgtgcccgtgaactactacagcgacgagctggaggacgagacaaagcacctggtggtggtgcggaagtccctgatcgacctgggggactccctgaagcggaactccatcgaggacgacatcatggacggcgccatccggcgcatcctgctgaaccacctcgacaagtacatggacggggacaccgaccaccccgagctggccttcagcgccgacggggtgaacgagctgaacaagcacatcatcgagctgaacggcggggtgttccaccaccccatcaacaaggtgcgggtgaccaccgtgaaggggcagcgcttcaaggtgtccgacgcctgcggcggctccaagcacgccgtggccgccagcgacaccaacctgttctacgccgtgtacctgaacgagaagaaggacaagcgggagtacgccacggtgccgttctacgaggccctgcggtgcaagcaggaggacctgcccgtggtgcccgagatcaacgagaacggcgccaagctgctgttcaccatcagccccaacgacctggtgtacatgcccgaggaggggcagtccctggaggacatcaagtccatcgaggacatcaacctgaacaacatctaccggttcgtgaacagcagcaccaaccgctccttctacatccccgccaccatcagcagcatgatcaaggagaaggtggagtacctgaaggccaacaagatcgagctggacgacgagaagatgtccatcaagacccactgctaccccctgcagaccgaccggctcgggaacatcatcgccatcaacaacatcaagctggac

SEQ ID NO: 145 - DNA, 3234 bp, synthetic construct
  source 1..3234: mol_type = other DNA
atgaccaacgtcaaggacaagaagtaccggctggggctggacctgggcaccaacagcatcggctgggccgccgtgtccctggacgacaacgacgagccctgcggcgtgctgggcatgggcgtgcggatcttccccgacggccgcgacgcccagtccaagaccagcaacgccgtggaccggcggatggcccggggccagcgccggcggcgcgaccggtacctggagcgccgccgggacctgatggacgccctggtggagttcgggctgatgccccaggacgccgagcagcgcaaggacctgcagaccctggacccctacgccctgcgggccaaggccctggacgagcccctggagcccagcgagctcgccagggccctgttccacctgaaccagcggcggggcttcaagtccaaccgcaaggccgacaccgacgaggtggagggccggtccctgtccgagcggatcggggagctgcggcggcagatgcaggaaacctccgcccggaccctgggcgagttcctgtatcgccgccgcgtgaactccgagacagtgcgggcccggccggacctgcggctgtaccccgaccgggccatgtacctggaggagttctgcaagatccgggccgcccagaagccccaccagcccctgacccccgaccagtgggacaagctgaaggagatcatcttccaccagcggcccctggagcccgtggaccccggctggtgccagttcgagtacgagaacgacgagaagcgggccgccaaggccctgcccgtgttccaggagttccggatcctgcaggaggtgaacaacatccgggtgcgggtggggtcccagcccgagcgccggctggacgagcgcgagcggggcgccgtgctcgcccggctgcgctcgggcaaggacatcgacttcggcaagctgaccggcgacctgcggaagctgctggccgaggccgacttcaacctggccctgggcggccgggagaagatcaagggcgacgagacaaccgcccgcctggccagcagcccccagcccgccaagggcgacaagcccgccaagcccgggctgttcggcgacaagtggctgaacctgcccatcgaccggcggaacgagatcgtgaagttcctgctgaacaccgaggaccccgacaaggtgcgggagaaggccatccaggagtggggcctgaacaccgcccaggccgacgccgtggcccgggtgtccctggtggccggctacgggtccctgtccgagaaggccatcaacaagctgctgccccacctggagggcggcatgcggtacgacgaggccgtgaagaaggagtacaagcaccactccgacttccggaacgaggaggcccacgacagcctcccctactacggcaaggtgctgccccgggacgccgtgggggccaacagcaagaaggcccccgagatcgacggggaggtggcccggtacggccggttccccaaccccaccgtgcacatcggcctgaaccagctgcggcgggtggtgaaccggctgatcgaggcccacggcaagccccaggacgtggtggtggagctgacccgcgacctgaagctgaacccccagcagaagcgggacctgctgaagcagcagcgggagggcgggcagtccaacatccgcttcaccgagatgctgcagtccatggggcaggacgtgacccccaacgtcctgcgcaagctgcggctctgggaggagcagggcccgccccaggcgcgggtctgcccctacaccgggcgccggctgtcctgcgagatggtggtgtccgagcagaccgaggtggaccacatcctgccctacagccggaccctggacaacagccccagcaatatggtggtgtgcatcgccgccgccaaccgcttcaagggggaccggtcccccgacgaggccttctcctccaacccccagaactactcctaccaggagatcctggaccgggtggccaagttccccgacaacaagaagtggcggttccagccggacgccatgaagcggttcgaggaggacgaccgcttcctggaccggcagctgaacgaaaccagctacctgagccggaccgccaagaactacctggcctacctgtacgacgagaagggcgaggggcggacccgggtgcgggccgcccccggccggatgaccgccctgctgcggcggggctggtgcctggagggcatgctccgcaccagccccgagggcgagatcacccgcaagcagcgggacgaccaccggcaccacgccgtggacgccttcgtggtggcctgcaccacccagggcctgctgcagaagttcgcccgggccgccggcgccagccacaactcggaggagcggctggccgccctggccggggaaaccccgccctgggagggcttcgaccgcaacaagctgaagcccttcctgggcaagatcgtggtgtcctacaagcccgaccacgggacccggggcgccaagaccaagtccaccaccgggcagctccacaaggagactgcctacgggctggtggagttctccgagaacggccccagcaaggtggtgacccgcaagaagctggacgccgtgaagaagcggaaggacctggagtccgtgcgggactccgtgatgcgggacgccctgctgaagctgtgggacgacgtcgcccgggagggcggcgaggtcggcagcttcagcgaccgggccgccaaggagggcgtcctgctggagaagggccggcggcagaccgtgcgccgggtgcgggtcctggacaagcagaccgtgatccccatcaagcgggggaagggccaccccgaggtggggaagccctacaagggctacctgctgggcggcaacgcctgggccgacatgtggcagatgcccgacaagcagaaaacctggaagatggtggtggtgcccaccttccacgccaaccagcccggcttcaagctggagcagttccgcccccacgccgacgccaagaagctgttccgcatccagatcgacgacatgggcgccctcggcgacggcgccgagcggcgcatcgtgcgggtgcggaagatcaccaacgccaccagcggcgccttcgtggtgctggacgagcacaaccaggccaacgtggccgaccgcgtgggcaaggacatgaaggagaaccggtacagcgcccgccagctgaagcagctgggcttccgcaaggtgggcgtggacgagatcggccgggtgctggaccccggcccccggaacccc

SEQ ID NO: 146 - DNA, 4065 bp, synthetic construct
  source 1..4065: mol_type = other DNA
atgtccaagatcctgggcctggacctggggaccaactccatcggctgggccgtggtggaaaccgacaacaacaagaccttctccctgaagaacaagggggtgcggatcttccaggagggcgtgaagatcgagaaggggatcgagggcagcaaggccgccgagcggaccggctaccggtccgctcggcggctgaagttccgccggaagctgcggaagatcgaggtgctgaaggccctgatcaagtacgacctgtgccctcacatctccgacgacgagctgatcaactggcgctacaagaagatctaccccaccaacaaggagttccggaactggtggctgaccgacaacaacgacaaccgggaggaccgcaagaagcagaccaagaacccctactacttccggagcaaggtggccaccgaccagctggacctgaccaaccaggaggaccggtacatcctggggcgggccttctaccacatggcccagcgccgggggttcctgtccaaccggctggagtccaccaagcagagcgagggggccgtgacccagaacatcaagcagatcaaccagcagaagggggacctgaccctgggccagtacttctaccagtgctactgcaacggggagaagatccggaaccagtacaccgaccggctggagcactacgagcaggagttcagccacatctgcaagctgcaggggatctccgacgagcagaagtccaccctgcacaaggccatcttctaccagcggcccctgaagtcccagaaggggctgatcgggaagtgccccttcgagcccaagaagtcccgggtggccatcagccacccggccttcgaggagtatcggatgctgtgcttcatcaacagcatcaagatcaagctccccgaggacgacaagctgcgcttcctgaccgagaaggagcgggagaaggtgatccccgtgttctatcggaagtccaagccccacttcgacttcgaggacgtggccaagcagctggcccccgccaagcagtacaagttctacaaggccaaggacaagaaccccgaggactacctgttcaacttcaacatgaaaaccaccgtgtccgggtgccccgtgagcgcccggctgaagtccatcttcggggacgagtggaaggagctgcagatcaagcacgagcggaaggaccacaccgactccatcatcgacatctacgacgtgtggcacgtgctgatgacctacgacagcgaggacaagctgttcgagttcgccaagtacaagctgtccctggacgaggacaagaccaaggagttcacccagttcaacctgccccaggggcacggctccctgagcctgaaggccatcaacaagatcctgcccttcctgcagctcggcctgatctactcccacgccgtgttcctggccaatatggtgaacgtgatcccgcccatcctgtggaacgaccccgagaacaagcagctgatcatcaacgagatcaagaagctgatccagtcccagaacgaggagaagcagatcacggacatcgtgaacggcctgatcaagatcaacaaggacagcaacgccgtgtggagctacgaggccgagaaggccttcaagaacgacctggtgaagaacatcaaggcctactacggcagctccaagtacgactccttctccaacgaccagaagtcccggatcgagacaaacgccttcgagctgctgaagatgcagatgcagaagaagaacggcgtgggcgagttcgccaaggtgaagcggatcgacgaccgcatcaagtccttcctgctggacaacttcgacggggacatcaagcccgagaacctgtaccaccccagcgccatcgagacattcaagcccgcccagaagaacaacgagaacaagtacctgctgggcagccccatcaccagcagcgtgcggaaccccatggccatgcgggccctgcaccagctgcggaagctgatcaaccagctgatcaacgacgacgtgatcgatgaggacaccatcatcaacatcgagatggcccgggacctgatgaacgccaacgagcggaaggccctgcagaactggcagcggcggcgggaggacgagcggaagaagtacgccgccgagatcgccaagcactacaaggccagcgggatcaacagcgagcccaacaacaccgacatcctgaagtaccagctgtgggaggagcagaaccacatctgcatctacaccggcaagaacatcgccctgcaccagttcctgggcagcaaccccgagttcgacatcgagcacaccatcccccagagcctgagcttcgacaacagccaggtgaacatcaccctgtgcgacagcaagtacaacaggacggtgaagcggaacaagatcccctacgagctgaacaaccccgacatcctgctgcggatccaccactggaagaaggagtacgagaacatcgacaaggagatccagaagtgcatcaagaacgcccggggcgcctccaccaaggaggacaaggaccggtacatcatccggcggcaccagctgaccacccagcggaactacatccgggagaagtaccagtccttcacccggaaggacgtgccctccgggttcaagaactcccagctggtcgacatcgggctgatcaccaagtacgcccggctgtacctcaagaccgtgttcgagcgggtgaacacggtcaaggggaccaccgtggccgacttccggaagctgtgggggctgcagaacgcctacgagacaaaggcccgggtgaaccacatccaccactgcatcgacgccatcaccatcagctgcatgaccaagccccagtacgacaagctggccaagttctaccacgactgggagtactccaaggaggagggcatggacaagaagcccgtgttcgagaagccctggcccaccttcaccgaggacgtcaagaccatcgagaacgagatcctgatctcccactacacccccgactccttcgccaagcagaccaagaagctgctgcggaagcgggggatcatccagaagggcaagaacggcaagcccatcgtgctgaagggggacaccgtgcggggcagcctgcacaaggagacattctacggggccatcgagcgcacccaggccaacaagaagggcgagctggagaaggtcatcaagtacgtggtgcggaagcaggtgagcgacctgtccgacgccgacgtgaagaacatcgtggacgaccgcatccgcgagatcgtgggcaacgcccgcaacgaggagaagaagatccagaaggagatcgagcggctgcggaagaagctgcagaaggccgaggagcacgaggagcccgccatcaagaacgacatctgcgtgctccagacggagatcgagcagctgtactccctgcccaacaagaagggcgcccccatccccatcaagaaggtgcggctgctgcagcccaccgtgaccaaccccctgtgcatcaagaagcagcgggacgtgaacaacaagaagcccaaggagtacaagcagaactactacgccgccaacgacggcaactacctgatggccatctacgaggggaaggacgccaagggcaagatcaagcgggacttcgagatcgtgaacaacatcaccgccggcgagttcttcaagcagagcgtgcagggcgacctgaagccccaggggatctccaccaacggcggcctgatccccaagcagaaggagaacggcaagctggtgctgccctacaagtccagcatcaagatcgggacgatgatcatcctgtgggagaagtctcccacagaggtgttcgacctggagctgaacgagatcaagcggcggctgtacaaggtggtggggctgtccgcccagaagctgaagatcagcggcaagagctacaactacgccaccatcgtgctgcggcaccaccaggaggccagcagcagcagcgacctcaagacctacgacggcgccttcaagcgggacgagacatacatggggcagcgcaagctgaaccacaaccagttcaacgccctggtggagaacatcgacttcgacatgaacaccaagggcaccatcaagtggatcaagcag

SEQ ID NO: 147 - DNA, 3123 bp, synthetic construct
  source 1..3123: mol_type = other DNA
atgtctcggaagaagaacgagacatacgtgctgggcctggacctgggcaccgagagcatcgggtgggccctggtgaagaacaagaagggcaagcccgagagcatcctcaagtccggggcccacaccttcgacgccggggtcgagggcaacatcgagtccggcggcgacgagtcccgggccaaggcccggcgcgacgccaggctgccccggcggcagcactggcggcgggcctggcggcgccgcaagatcctgcggatcctgcagcgcaacggcatgatgcccgagttcgacaccagcagccccaccaacgtgcacgaggggctgctggccgtggactccaagctgcgcgagaagcacagcatcaacagccaccgggtgtccgcccacctgctgccctacatcctgcggaagaaggccctggaggagaagctgcccctgcacgacgtggggcgggccctgtaccacctggcccagcggcggggcttcctgtccaaccgcaaggccgggaaggccgacgacgacgagggcgtggtgaaggagggcatcagcgagctgcgccagaagatggaggccagccactcccccaccctgggggcctacttcgccaccctggaccccgaggaggagcggatccggaagcggtggacctcccggcagatgtaccaggacgagttctacgccatctgggccaagcagcagaagcaccacaaggccctgaccgacgagctgaagaaggagctgtacaacgccctgttcttccagcggcccctgaagtcccagaagcacctggtgggcaagtgcgagctgatccccggggccaagcacgcccccatcgccctgcggatcacccagcggttccggctgctgcaggccgtgaacaacctgtgggtgtacctgcccgacaacaccgagcggaccctgacccgggacgagcggaacaccctgatcgaggccctggagactcagggcgacctgagcttcgccgcgatcaggaagatgctgaagctgaagaagggcaccaccttcaacctggaggagggcggggagaagcggatccccgggaaccgcaccaacaccgccctcttcaagatcttcggcgaccggtggctgaagctcaccgagaacgagaaggacgccgtggtgcaggacctgatgtccttcgagaaggccgagcccctggcccgccggtcccggaacacctggaagctggacaagcaggccgccctggagctgagcgagctcagcctggaggagggctacgcccggcacagccggcgggccctggagatcctgacccccaggctggaggagggcctgccctacgccaccgccaagaaggacgagttccccgagtccttcgagtccaccgaccccctggacaccctgcccccggtgatcgagacagtgcccgacctgcggaaccccgcggtgtgccgggcgctgaccgagctgcggaaggtgatcaacgccatcatccgccgctacggcaagcccgagatcatccggatcgagctggcccgcaacctgaagcaggccaagaagaagcgggccgagatctccaagaagaaccggcagaacgagaagtccagggagaaggccaaggccaagatcctgaaggagctgaaggactccctgcccagccgcaccgacatccagaaggtgctgctggccgaggagtgcaactggatctgcccctacaccgggcggtccatcgacatgaagtccctgctggggaagaacccccagttcgacatcgagcacatcctgccgatgtccaagtccctggacaactcgtacgccaaccgcaccctgtgctaccacgaggagaaccgggaccgcaaggggaaccgcaccccctacgaggcctaccacgccaaccccgagaactgggagcagatcctggggcgggtgaagaagttctccggggacatggcccgggagaagctgcggcgcttccagatggaggagatgcccgagggcttcgccgcccgggccctgaacgacacccggtacatcagccggctggccggggactacctggccctgctgtacggcgggcggtccgacgccgacggcaagcagcggatccaggtgtccaccggcgggatcacccaccacctgcggaacgagtgggccatgaacagcatcctgaacgacggcggggagaagtccagggacgaccaccggcaccacgccgtggacgccatcgccatcgccctggcctcccccgccaccgtgaagcagctgtccgaggccgccgtgaaggcccagcagaacgggcggcggctgttcgcccccgtgcccgagccctggaaggacttcctggccgaggcccgcgacagcatcaaccgcatcaacgtgagcaagcgggcctcccggaagatcgcgggcatcctgcacgccgagacactgtacagcaagcccatgccctcccggaacggggagggcgtgcggcacatccggaaggagctgcacaagctcagcgtgacagagatcaaggggaacgccatcgtggaccccaccatccggcggctggtgcaggacaagttcacccagctgggcgagaacaagcccgacaaggtgttctccgaccccgacaaccaccccatcatcgtgtccagcgacgggcgcaccatccccatccacaaggtgcgcatcaaggccaaggtgaagccctggaagatcgggaagggccccaaggagcggtacgtgagcgccaaggccggcagcaaccaccacaccatcatcgtggcctccctggacaagagcaacaacgagatcaagtgggaggaccaccccgcctcccgcttcgacgtgcacatccggaagaacaacaaggaggagatcatcaagcggacctggaacaagggccagcggttccgcttctccatcacccccaacgactacatcatcatgaaggacagcaacggggaggagcagctgtaccgcgtggcctccatctccaagggggacatcgagttccggctgcacaacgacgcccggacgatggacaaggtgaaggccgccaagcagcgggtgcgggccggggccgagaagatgcggaagcacaacgcccggaaggtgcacgtgacctacctgggcgaggtgatccccgccaacgac

SEQ ID NO: 148 - DNA, 3141 bp, synthetic construct
  source 1..3141: mol_type = other DNA
atgatgaaccactccgccgagacaaccctgggcatcgacctggggtccaactccgtggggtgggccctgacctcccccgacggcatcgtggccatggggagccggatcttcgccgagggggtgagcgccggcatcgagcagggccgggaggagtcccggggcgtggagcgccgggaggcccggcagctccggcgccagaccgaccgccgggtgcggcggctgtccaaggcctacaacctgctggccggcgccgggctgctgcccccggccgccaagtcccggcacctggccctgcagaacctggacgtggagctgggcaagcgccacgccagccaggagcccggggccgcccacaccctgatgtaccggctgcgggcccggggcctggaccagaagctggaggccgacgagctgggccgggccctgtacagcctggcccagcggcggggcttcaagtccaaccgcaagaccctggccaaggaggacgaggaggagggccaggtgaaggagggcatcgcccagctgcggaaggagatcgaggagtccggcgcccggaccctcggggagtactactccaagctggaccccgtgaaggccaagcagcgcatcagggcccggtggacccaccgggacatgttcgagggcgagttcgaccagctgtgcgccgcccagcagatgcaccacagcgaggtgctgaccgacgccttcgtggcccggctgcgggaggccctgttctaccagcggcccctgaagcccatcatgcccgggaagtgcgacctggaaaccagcgagtaccgggcccccatcgcccaccccctgaaccagcggatccggctggtgcaggtggtgaacaacctggagatcgtgccgcccaccgggctgggcgtgcccgagcccctgaccgacgaccagcgggacctgctgatcgagacactggagcgggacggcgacctgacgatggccgccgcccgcaagctgatcggcatcaaggggcgcgggtggaagttcaacctggaggagggcggcgagaagcggctggtggggaaccgcacctccagcaagatcgccgaggccatcggcgacgcctggaccctgctgcccctgggcgaccaggccaagctggtcgaggacctgctgtccgacaaggagagcgaggagctggaggagcacctgaaggggcggttcaccgccgcccaggccgcccggctggtgggcgtgcggatcgagcagggctacgccagcctgtccctgaaggccatccacaagctgatccccttcatcgaggccggggacaggtacggcgccgcccggcacgagctgtacggcgacatggaccgcaccggggtgcccctggacaagctgcctcccgcccgggagaagttcggcaacctgcggaaccccgccgtggagcgcagcctgtccgagctgcggaaggtggtcaacgccgtggtggccacctacgggaagcccgaccgcatccacctggaggtggcccgggacctgaagaaccccaagaagcggcgggaggagatctggaagcgccagcgcgccaaccagaagtcccgggagaaggccgccgccggcatcatcgccgagttccccaacttccagccgcggcgggacgacctccagaagcacctgctgtgggaggagtgcaacggcatctgcccctacacggggcggagcatctccctgaacgccctgttcggggacgatgcccagttcgagatcgagcacatcatcccccggagccggagcctggacaacagcttcaacaacaagaccctgtgcaccgtggaggccaaccgggacaaggggaaccgcaccccctacgagcacttctcccacgacgccgccgcctgggagcagatcctgcagcgggtgcggcggttccggggcgcctccgcctaccagaagctgcggcgcttcgagatgaaggaggtgaccaccgaggacttcctggagcggcagctgaacgacacccggtacgccagcaagctgagcgccgagttcgtggggctgctgtacggcggccggaacgccgacgggaagcagcgggtgcaggtgagccccgggctggccacctggcagctccggaacgagtggggcctgaactccatcctgaacgacggccccaccagcgacgggggccaggtgctcaagacccgggacgaccaccggcaccacgcggtggacgccctggtgatcgccctgaccaccaacgccaccgtgaagcagctggccgacgccgccgcctacggcgaccgggacagccggcgggagccctgctccccgccctggcccgacttcgtcgacagcgtgcggaagtccgtggacggcatcgtggtgagccaccgggtggaccgccgggtgcggcggaagatgcacaacgacaccttctacagcaagccctacgagcggaccgtgaagggcaagaccgtggaggtgcggcggtaccgcaagtggctccagaacctgtccaccaaggaggtggaggggatcgtggaccccgccgtccgggacgccgtgcgcaagaagctggaggagatcggggaccccaagaagttcgccgaggagagcaacctgcccaccctgccctcccggcggggcgacgccaccatcatccggagcgcccgcatcgagcgggtgcagtccgtgcaggccatcggcgagggggaccgccagcggttcgtggagctgggctccaaccaccacctggaggtgttcgccgtcctggacaaggacggcaacgaaaccaagtgggacgggcggctggtgtccacctacgaggccatgcagcggctgcgcgcccggcgccacggggaggagactcccctggtgcagcgggaccacggccccggcacccggttcaagttctccctgagctccggggagatgatcgagctggacgacgggggcggcgcccggctgtgcgtggcccgcaccatctcccagcagggggagaagaacgggcggcggcccgccccgatggtggagttcgtgagctccaccgactcccgcctgaagaaggggatcaagcaggccaacgcctggggcgccaaccccgtgaacaccctgcggaagttcgggtgccggaaggtggtgatcagccccgtgggggaggtcatcgaggcccacgac

SEQ ID NO: 149 - DNA, 3237 bp, synthetic construct
  source 1..3237: mol_type = other DNA
atgaacaccgccaacgagaagtaccggctgggcctggacatgggcaccaacagcatcggctgggccgccgtgcggctggacgacgacggcgacccctgcggcctgctggacatgggggtgcgcatcttcagcgacggccgcaaccccaaggacgggtccagcaacgccgtgaagcggcggctgccccgcggccagcggcggcggcgggaccggtacctcaagcggcgggactccctgatgggcgccctgctggagtgcgggctgatgcccgacgacaagcgggagcgcaagaagctggaggcctgcgacccgtacgccctgcgggagcgggccctggacgagcccctgagcccctacgagctggggcgggccctgttccacctgtcccaccggcgggggttcaagtccaaccgcaaggccgggaacgaggacgagtccgaggccaaaaagacccgggccgagatcgacgccctgcgggcccagatcgacggctcgggggcccggaccctgggcgagttcatggccaagcggcactccaagggggagcccgtgcgggcccggcggggccagaacctgtaccccgaccgggccatgtacgagcgggagttcgacgccatcagggagcagcagaagccccaccaggggctgtccgccgagcagtgggagtggctgcggagcatcatcctgttccagcggccactccggccggtggaccccggctactgccagctggagactggcgagcggcgggcccccaaggccctgcccatcgcccaggagttccggatgctgcaggaggtgaacaacctgaagatccgggtgggcaccgagcccgagcggcggctggacgccaaggagcgggagcgggccctgacccggctgcgggccgggaaggacatcaagctgcgggagggcaaggacaaccggcccgccaagctgacccgggacctggacctgccctccggcgccgtgttcaacctggcccgcggcggccggaagtccgtggagggcgacaagaccgccgcccgcctgatgtccaagaaggagaagggcgagaaggagcaggagctgttcggggaccgctggcacgagttcagccccgccgagcggaacgacatcgccaagtccatgctgaaaaccgaggaccccgaggtggtgcagcggaaggccatggacgagtggggcctggacgaggcccaggccaaggccatctcccacgtgtccctgccccggggctacgggaacctgagcgagaaggccatcaccaagctgctgccccacctcgagaagggcctggtgtacagcgacgccgtgctggccgccgggtacccccaccacagcgacttccggaacgccgaggcccacggcaagctgccctactacggcgaggtgctggagcgggacgccgtgggggccgaccccaccaaggaccccgagaaggacggggagcccgcccggtacgggcggatcggcaaccccaccgtgcacatcggcctggggcagctgcggcgggtggtgaacgggctgatcgagtcctacgggaagcccgaggagatcgtggtggagctggcccgggacctgaagatgaaccgggagcagaagcagaactaccagcggcagcagcgcgagggcggggagcgcaaccagcgcttccgggaggacctgaagtccgccgagctgagcgtcacccccgaggccctgcgcaagctgcggctgtgggaggagcaggggccctgccaggcccggctgtgcccctacaccgggcggcccctgtccttcgagatggtggtgagctcccagaccgagatcgaccacatcctgcccttctcccggacctgggacgacagccccgccaacaaggtggtgtgcgtgcgggaggccaaccggtacaagggggaccggtccccctacgaggccttcggcaagtccagcgacggctacgactacgacaagatcctgacgtacgccgccaagctgcccgacaacaagcgctggcggttcgagcccgacgccatgaagcggttcgaggaggagggccgcttcctggaccgccagctgaacgagactcggtacctgagccgcaccgcccgcacctacctggcccacctgtacgacgaaaagaccgaggggtccgtgcgggtgcgggtggtgcccgggcacatgaccgccgtgctgcggcgggggtgggggctggagaacatgctccgggtggaccaggacggcgtgctgatcaagagcgagaagaagcagcgggacgaccaccggcaccacgccatcgacgccttcgtggtggccaacaccacccagggcctgctgcagcggttcgcccgggccgccggctccaacgacgacaccgaggagcggctggccgccgtggccgggagcgtggtgccctggaagggcttcgaccgcgaggacctgcggcccttcctgaacaggatggtggtgtcccacaagcccgaccacggcacccgcggcgtggacggcaagaccaccggccagctgcacaacgccaccgcctacggcctgatcgagtacagcgaggacgggccgtccaaggtggtggtgcggaagaagctgaccgacttcaagcgccgcgccgacctggagtccatccgggactccgccctgcggcaggagctgctggccctgtgggaccgggtgaagtccgagggcggcaagcccgccgacttcgccgagcgggccgccgacggggccgtgctgggcggccaccccgtgcggtccgcccgggtggtggagaacctgcgggtgatcgccatcaaggactccaacgggaacccctacaaggggtacaagctggacaacaacgagttcgccgacgtgtgggccatgcgcgacggcaactggaagatccgggtggtgagcaccttcgaggccaaccagcgggacttcgacatcgaggactcccgccccgtgacctcccgcgggaagcacaagggcaagcccgaccccgccgccaagtggctcatgcgcctgtacaagggcgacatgggcgccctggaggacggggcgggcgtgcgcatcgtgaaggtgcgcaagttctcctccgggagcgtgatcctggacgaccacaacgaggccaacgtggacggccgggagcgcaagggggagatcgaccgcaacatgtccatctacagcgccaagcagctccgcgagcagggcttccggaaggtgcgggtgaccgagatcgggcgggtgcgggacctgggccccctg

SEQ ID NO: 150 - DNA, 3153 bp, synthetic construct
  source 1..3153: mol_type = other DNA
atgcgccagaaggcccccaagaagtgcgtgctggggctggacctgggcaccaacagcgtgggctgggccctgctggaggagggccgggacggccccgagcgcatcgtggacctgggcgtgcggatcttcgaggccggggtcgagggggacatcgagtccggcaaggacgagagccgggccaaggcccggcgggacgcccggctggtgcgccgccagaccgagcggcgcagccggcggcggcgcaagaccgcctgcctgctgcagcgccacgggctgctgcccaagggcgggctgaagcaggacagcagccgggacgccatcatcaagtccttcgacgccgacgtgtacctgaagtacgccgccgccgtgcggaagaagaagaaggacatcctgcagaccctggaccagctgccctacttcctgcgcgcccgggccctggacgagcccctggagcccttcgagctggggcgggccttctaccacctgtcccagcggcgggggttcctgagcaaccgcaaggcccccaccaaggacggggaggaggaggggcaggtgaagcagggcatcagcgagctggcccaggagatcgagcagtccggggcccggaccctgggcgagtacttcgccgggctcgacccccacgagcaccgcatccggaagcgctggaccgcccggacgatgtacgagcaggagttcgaggccatctggaccgcccaggccaagcaccacccgaagatcctgaccgccgccttcaagaagcagctctacaagagcatcttccggcagcggcccctgaagtcccagaaggggctggtgggccgctgcgagctggaggagggggcccggcgggccccctgggccagcttcatcgcccagcggttccggctgctgcagaaggtgaacgacctgaagatcgtggggcccgcccccttcttcgaggagcgggggctgagccccgaggagcggaccctgctgatcgacctgctggcccagaccggcgacgccgagttcaccaagatccggaaggagctgggcctggagcggggctccaccttcaacctggagcggggcggcgagaagaagctgaagggcgacaccaccaccgcccggctccggggcgtgttcggcgggcggtgggacgccctgaccgaggaccagaaggaggccgtgctgcacgacgtgtacagcatccagaacgagaaggccctggccagccggggcgtgcgggcctggaagctgagcaaggccgacgccgagaagctcagcaagaccgccatcgaggagggctactgctccctgagccggaaggccatcgagcggatgctgcccgagatggagcagggcgtgccctacgccaccgcccgcctgcacgcctaccccggccgggaccggtccatccccgtgggccggctgccctacatcgacgaccgcgacaacgtgaacatcgagctgcggaaccccgccgtgcaccgggtgctgtccgagactcggaaggtggtgaacgccatcctggacaagcacggcctgcccgggtgcatccggatcgagctggcccgggacctgaagaagtcccggtccgaccgggccgagatctggaagaagaaccggcagaacgagcagctgcgggagaaggcccgggccaagatcatcaaggaggccgtgatcccccagccctcccgcgaggacatcctgcgggtgcagctggccgaggagtgcgactggacctgtccctacaccgggaagcacatcagcatgaaggccctggtgggcaaggactcccagttcgacatcgagcacatcatcccctacagccggtgcctggacaacagcttcaccaacaagaccctgtgctaccacgaggagaaccgcaaccgcaagcagaacaagacgccccaggaggcctacaccccggacgagatggacgccatcgtggcccgggtgaagtccttcaagggcgaccggcgggccgtggccgccaagctggggcggttcctgaccaccagcctggacgccttcgacacgttcagcaaccggcagctgaacgacacccgctacgccagcaccctggccgcccagtacctgggcatgctgtacgggggccagatcgacgccaacgacacccggcggatccaggccggccgggggcaggtgaccagcgacctgcgcatggcctggggcctgaacggcatcctgggcgacgggggcaccaagacccgggacgaccaccggcaccacgccatcgacgccgtggccatcgccctgaccgacgccaagaccgtgaaggccctgtccaccgccaacagcaaggggtacgccgaggggcgccggaactggtggaagaacgtgccccagccctgggacggcttcctgaccgagctgaccgaggccgtgaacggcatcgtggtgtcccaccgggtgtcccggaaggtgaacgggcccatgcacgacgagacaaactacggcaagccctacatggacgacaaggacaagccttgctgccatgtgcggaagcccctggcctccctgtccgccaaccgcatcgacgacatcgtcgacccggtggtgcggcaggccgtgcgccgcaagctggaggagctgggcggggaccccgccaaggccttcaaggacgagcagaacctgccgtacctgaccacccacgacgggcgcaagatccccatccggaaggcccggatccgggtggtggccagcgccaagaccatcgggaagggctcccgggagcggcacgtgctgctcaacgccaaccaccacgccgagatcatcgagatcaccgacaagaaggggaacgccaagtgggacgacatcatcgtggaccgctacaccgccatgcggcggctgctgaagcacgagcccatcatccagcacgagcacggcgagggcaagcggttcgtgatgagcctgacccagggcgacgtcctgctgatcaaggacgacgacgacaacgagcagctcgtgatcgtgcggagcgtgtccaagaaggactactgcttcgtgcgcctgaccgaggcccggctgaagaaggacatcgtggccgccggcaagtgggtgcggttccagagcttcagcctgttccagagccgcttcatcaagaagctgcacctgacgcccctgggcgagatgcgcgacagcaacgac

SEQ ID NO: 151 - DNA, 3168 bp, synthetic construct
  source 1..3168: mol_type = other DNA
atggggtcctacaccgtgctgggcctcgacctgggggcccagtccgtgggctggaccctgctggagtacaagaaggacaaccccgcccgcatcgtggacatgggcgcccggatcttcgaggccggcgtggagggggacctggagtccggcaaggaggagtccaagaccaccgaccgccgcgaggcccggctgcggcggcggcaggccgagcggcggtcccggcggatggagaacctggcctgcctgctgcggcggcacgggttcctgcccaagggcaagatccgctccggcaaggagcggcacgagctgctggccaagctggacaaggagatctacgacaagtaccgcaaggagctgggggaggacaacgactccctcgactccctgcggcagctgccctacttcctgcgggcccgggccctcgaccacaagctggccccctgcgagctgggccgggccctgtaccacctggcccagcggcgggggtacctgagcaaccgcaaggcccagcgcaacgactccgacaaggactccggcaaggtggagcccgccatccactccctgcgggagaagatggaggccgacggggtgcggaccctgggcgagtacctggccaagatcgaccccttcgaggagcagcggctccgccagcggtggaccgcccgctccatgtacaaggacgagttcgaggccatctgggccgcccagaagaagcaccaccgcaagaagctccacgacaccctgaagaaggaggtgtacaacgccatcttcttccagcggcccctgaagtcccagaagcggctgatcggggagtgcgacctggtggccaagaagaagcgggcccccaaggccctgctgctgagccagcggttccgctacctgcagaagctgaacgacctgcgggtgaccttccccgacggggtggagcgcgagctcaccgacgaggagcgcaacaccctgatccccctgttcgaggggcaggccaacgtgagcttcgccgccatgcggaagcccctgaagttccccaagaccgtggagttcaacttcgagaagtcggagaagaacctgcccgggaacgtgacccgggcccggctggagaagatcttcggggcccgctgggagaagctcgacgccgagtcccagaacaccatcgtgggggaggtgatgggggccctgaaccccgacaccctggccaagcggggcgagttctggggcctggaccccgaggccgccgccgagttcggcaaggtgcagctggagtccgggtacgtgaacctgtcccgcgaggccatgcgggagctgctgcccctgatggagcaggggatggccttccgcaccgccgtgaccgagcggtacggcgaccagtgggccaagacggccctggagaagctgcccccgctgatcgacgccgtgcccaccgtgcggaaccccgccgtgacccggaccctgaccgagatgcggaaggtgatcaacgccgtgatcgacaagcacggcaagcccacctacacccgcatcgagctggcccgcgagctgaagaagaacgccaaggcccgcaacgagatcttcaagaacaaccgcaagcggcggatggcccgggagacaatccgggagtccatccagaagcacaacggggacgccaacccctcccggcgggacatcgagcgggtgctgctgtggcaggagtgcaacgagtgctgcccctacaccgggaagaagatctccttcgccagcctgctgtcccccgagagcagctgggacatcgagcacatcatccccttcagccgctgcctggacgacagcttcttcaacaagaccctgtgctaccacgaggagaaccagcacgtgaagaagaaccagaccccctacgaggcctacgaggccaccgcccagtgggaggacatcctgtcccgggtgaagcagttcaagggggacgccgccaaggagaagctgaagcggttccagcagaccaacctggacgacttcgaggacttctccgcccggaagctgaacgacacccggtacgccagcaagctggccgcccagtacgtgagctggctgtacggggaggaggcccgcaagcgggtgcaggtgtccaccgggcagatcaccgcctacctgcggggcgcctggaagctgaaccagatcctgaacgacggggacaacagcaagacccgggccgaccaccggcaccacgccgtggacgccctggtggtggccctgatcgaccactccaccgtgaagcggctggccgacgccgccaagaagcagcagttcaagaacggccgctacaacgggttcaccaagcggttcgggcgggacgagccctgggagggcttcctggacgacgtgtaccacgccgtggacaacatcaccgtgtcccaccgggtgtcccgcaagatcagcggctgcctgcacgacgacaccatctacagccctccccaggaggacgagaagggcaaggagtacgtgaaggtgcggaagtacctgggggagaagttcggccccaaggagatccagaaggtggtggaccccgagatccagcggatcctgcagtcctggctggacgaccaccacggggactccaaggccgccttcgccgaccccgacaaccacccctacctgtacgtgcacaacgaggactcctcccgggggaagatccccatccacaaggtgcggatgaaggagtaccgggaggtgcagcagatcgggaaggaccaccggtcccgccacgtgtggccccgggccaacaaccacatcgagatcttcgccctgcacgacaaggacggcaacgtgaagaagtgggagggccgggtggtgtccaagctggacgtccaccagcggaagaagcagggcctgcccatcatcgaccgccactgggacaagcagcacaccttcctgttcagcctgacccagggcgacaccatcgaggtggacgtggagatctccaacgacgagacaatccgcgagctgtactacgtgcggggcatcagcaaccagctgacctgctcccacatcagcgacgcccggaagaagggggacatccccggcaagcagaccgagaacgaaaagacccggttcctgctgcggccatacgtgaccagcctgcagaagctgaactgcaaaaagaccagcatcagcccgctgggcgagatctacctggccaacgac

SEQ ID NO: 152 - DNA, 4221 bp, synthetic construct
  source 1..4221: mol_type = other DNA
atgtccaacatcctgggcatcgacctggggaccaactccaccgggtgggccatccgggacaccgagatcgaggacaaccagatcgtggactacggggtgatcaccttcgacaagggggtggcctccgagaaggggaacgagttccccaaggtgcagaagcgcaccgagtcccggggcaagcggcggaactaccaggccgagaagtaccgcaagtgggagctgctgaagttcctgatcgagaaggggatgtgccccctgaccatcgacgagctgaacaactggaagaagtaccgcaagggggagcagcgcaagtacccccagagcgaggagtggatcaactggctgcggttcgacttcaacggggacggcaagcccgacttccacctgttcggcaaggacgagcacgagtcctactacatcttccgggccgccgtgctggacagcaacttcaagttcgtgtacgagaacaacccccagatcctggggcggatcttctaccagctggtgcagcaccgcggcttccggggccgggacgaggaggaggccaagacgatgctggagggctccaccaagaacggcaccgccggccgcaacgacatcgcctcctacatcgaccagcacaagaccctgggggccgccctgtaccactaccagaaggagaacggcggccggatccggcagcggtacaacctgcggaaggacttcgagtccgagctgcagcagatctgcgccttccacaacttctccgaggaggactacaagaagctgtggaaggccatcatctggcagcggcccctgcggacccagaagggcctggtggggaagtgcatctacgagaagaacaagaagcgggtgcagatctcccaccccctgtacgaggagtacaggacctggatcttcatcaacaacctgaagatcgtgccgcccaacggctacgacaaggaggcctacctgaaggagaagatctaccccctgttcctgcgggcctccaacgacttcaagctggaggccatcaggaagcagctgaccaaggacggggccatcatgctggcccacttcgccgacaagaccaaggtgatcagcgccaagctgctgaacgcctacagcaccctgctgggcgaggactggcgggagaacttcgggtggaacaccatcaacaaccgcgacaagcagccccagaagaaaaccaccgccaactactccttcgaggacatctggcacgtgctgaacaccttcgacggccaggagaacctgaagcagttcgccatcgagaagctgaacctcgacgaggagaaggccgagaagttcagcaagctgaagctgaacaacggctacgccaccctcagcctgtccgccatcaagaagatcctgcccttcctgcagaagggcttcctgtacagccaggccgtgtacatggccaacctgtacaaggtcctggggtccgagacaatctccgacgagctgatcgactacttcgccaacgaggtgaacgagatcatcgacggcaacaagaaggagaagctgcagaacaccatcgtgaacagcctggtgcaggacgagctgaactccgagcaccggttcagcatcgaggtggaccgggagctggacaacagcgagatccagcagatcaacgacaagatcatcgacatcatcggccagagctcctgggagaagaactactccgaggaggagcagcaggagctcctgaactacgtgacccacaagttcaaggagttcctgaagaagtccgtgctgagcaagcgcaacgtgttcatcgagcagcccaggctgcacgagcagatctggcagttcaccaagaccacctacaacgtgcccgacgagaacaagaagtacctgtggcaccccagcgagcaggacacctacgtgtccgccgacgactacgaggaggtgatgtactgcggcaagaccacctacatccccaagcgggagatcgagaagtacctgaagaagcacgacaacgccgagctggcctgccgcaccatcaagctgctgggctcccccgagcccatcagcaaggggttcaagaaccccatggccctgaagtccctgcacaagctgaagcacctgatcaactacctgctgcagaccgggaagatcgacgaggacacccggatcgtggtggagatcgcccgggagctgaacaacgccaacatgcgcaaggccatcgagcagtggaacgccaagcgcgagaaggagaacgacaactaccgcaaggagatcgcccagtacaacgacgagaagggcaccaagatcgacgagaacgatcggaacctgctgaagaagatccggctgtggcacgagcagaacaagcggtgcatctacaccgacaaccccatctccatcagcaacatcctgaacggggagaactacgacatcgagcacaccatccccgccagcatcagcttcgacagcgagctgaagaacctgaccctggccgacgtggacttcaaccgcaacgtgaaggggaagcagttccccagccagctggccaactacgacgtgatcctgaagaacatcgaggtgatcttcgggaagaaaaccgtgaagatcgaaaccgacaagaaggggaacaagaaggagtacaccacctggcagaagatcgaggatctggaggaccagatccaccagaagaacatcgcggtgaagtgcgccacctccgtgcacaccaacaacgggtactgcaagtgcaagaactgcgagatccagcggcggcacatcctgcagttcaacctgaagtacctgaaggacaagctgaacaccttcaccatcgacgagtacaaggccagctggcggaacagccagatccgggacacccagatcatcaccaagtacgccctgccctacctcaagaccgtgttcaagaaggtgagcgtggagaagggcagcatcaccaacgccttcaaggagatctacaaggtgaagctgaccgagggcaagaaggaccgcagcgtccacagccaccacgcccaggacgccgccatcctgaccctcatcccgcccttcttcgaccgggacaagatcctggagaagtacttccgggagaaggagatcgactaccggcggtgctaccacgagaagcccaaggactgggacaacttctccgccagctacatcctgggcatcgagaacaacgtgctcatcaacaacctgagcgagaacaagaccaccctgcccacctacaagatcgtgcggaagcggggcaagaagatctggctggacaaggagcagaacatcccgatgatcgcccagggggacaccatccgggggcagctgcacggcgagtccatctacggcgccatcaagctgcccctgcggaacgagaacaaccagatcctgttcgacgacgagggcaagatgctgctgagcgaggagcccatcctggtgatccggaaggacctgaagtacaagaaggacgccaacagcaccgggttcaagaccctgggcgagatcgagaacgccatcgtggacaaggacctgttcaaggtgatcaagcagcaggtggaggacgccaccgacttcaagaccgccctggagaacggcatctacatgctggacaagaacggcaacaaggtgaacaagatccggcggatccgctgcatcgagaagatgaagtacaacaccgccatcaaggtgcacgagcacaccaccaagtccgacaaggactacaagcggcacaccctcgccaagaacggcgagaacgccctgtgcctgttctacaagaacgagaagggcaaggccatgcagatcctgagcatctccgaggtggccgagctgcggtacaagaacgacaagcagtacttccacgagaacgacttcaaggagacactgaccgggcgggggaagaacaaggtgtccatccccctgtacgccgtgctgcggaacggctgcaaggtgctgttctacaagaacaccatcgaggagctgaacgacctgagccagtccgagctgtccaagcggctgtacaagatctaccagttcgagaaggaggtgcggaacaacagcatcaagtaccgcatgaagctgaagcaccacctggccgccggcatcgacaccgagctgaagaaggtccacaaggagtacagctccccggacttcgccctgaaccaggtgttcctgcggctgagcaagggccagtggaacttcgccatcgagggcaaggacttcgagatgaagctggacggcaccatcgagttcaaggac

SEQ ID NO: 153 - DNA, 3138 bp, synthetic construct
  source 1..3138: mol_type = other DNA
atggtgtgcatgcccctggtgttcggcctggacatcggcaccaccagcgtggggttcgccgtgatcgagcacgactccgagctggccaccgggaagatccaccgcctgggcgtgcggatcttcccggaggcccgggaccccaagggggtccccctgaaccaggagcggcggcaggcccgcctgcggcggcggcagctgcgccgccgccgcgagcggcgccggctgctgggcgaccagctgcgggccgccggcctgctgccctcccggaactcccccgactgggaccgggtgatgaagcgggacccctacgacctgcggcgccgggccttcgagggggagacactgagcccccacgagatcggccgcgccatctaccacctggcccagcggcggcacttccggggccgggacatcgacgaggtgtccgacaccgccgacgacgccgccggcgacgccgatgagaagaaggccaccagcgccagggagcagaccgtgcaggccctgaagcgcgagggcaagaccctgggcgcctggctgagcgcccgggggccccacgagcgcaagcggggcgagcacgccacccgggacatcgtggaggacgagttcgacaccgtgtggatgcccctggtgcccgagcccttccgctccagcgtgcgcgacgccatcttcgtgcagcgccccgtgttctggcggctgaacaccctgggcaagtgccggttcgtgcccgacgccccgctgtgccccaagggctcctggctcagccagcagcgccgcatgctggagaagctgaacaacctggccctcgccgggggcaaccagcggcccctggaccccgaggagcgccaggccatcctgagccgcctgcaggtgcaggccagcatgacctggcccggcgtgcggcgcgccctggcccccgtgtaccgggcccggggcgagcccggggaggagcgggccctgaagttcaacctggaggagggcggcgagaagaagctgctgggcaaccccgtggaggccaagctggccgacatcttcgggtccgactggcaggagcacccccggaagcaggagatccgggactccctgccccggcgcacctggcaggccgactacgagcaggtgggcgaccagcgcgtggtcatcctgcccaaggccgagcgcaccacccggcgggccgaggtggtgcagaacttcgtggccgagttcggcctgtccaacgaccaggccgccaagatcgagactatgaagctgccctccggctgggagccctacagcatcgaggccctgcaggccatgctgccccacctggaggccggcgtgcgcttcggggagctggtgaacgggcccgaccgcgaggagtggcgggccaagaccttccccggccgggagcagcccaccggggaggtgttcgaccggctccccagccccgccgaccgggaggagcgcgagcacgtggcctccctgcgcaaccccaccgtggcccgcgcccgcaacgagctgcggaaggtggtcaacaacctgatcgacctgtacgggaagcccgacctgatccgggtcgaggtggcccgggacgtgggcaacagcaagcggcagcgggaggagaaggcctccggcatccgccgccaggagcggcggcggaaggccgcccgcgagactctgcagcagaacggcatcgccgagcccagccgggccgtggtggagaagtggatgctgtgggaggagtgcgggcaccgctgcccctacaccggggacaccatcagcttcgacgccctgttccggaccggggacttcgaggtggagcacatctggccccggtccctgtccctggacaactccttccggaacaagaccctgtgccggaaggacgtgaacctgcagaaggggaaccagaccccctacgagttcttccgctccaacgaggaggagtgggacgccctggccaaccggctggccgggatgaaggccgcccggggcggcaccgggatgagccccgggaagatccggcggttcctgacccccagcatccccgacggcttcgccgcccggcagctgaacgacaccggctacgccgcccgggaggccgtggcctacctgaagaagctgtggcccgaccaggggcccgaggcccccgtgaaggtgttcgccgtgagcggccgggtgaccggccacctgcggcggctgtggcgcctgaacaacatcctggccgacgacggcgagaaaacccgggccgaccaccggcaccacgccatcgacgccctgacggtggcctgctgccaccccgggatgacccagaagctgtcccggcactggcaggaggaggacgaccccagggccccgcagccccacctgcccccgccctgggagacaatccggcgggacgccaagtccgccgtggccgccatcgtggtgagccaccgggtgcggcgcaaggtgtccgggcagctgcacaaggagacaatctaccgggacaccggcgaggagatcgccggcgcccggggcaccacctaccggtacttcgtgcggcggaaggccgtggaggagctgaagaacagcgagtccgagcgcttcaacgggacccgcatcatcgacatcgtcgatgacggggcccgggacatcgtgcagatctgggtggacaagcacgggggcgaccccggcgccgccttcgtggacggctaccccaagcggggccggaagggccccgagatccgcaaggtgcgcctgcgggtgaagcagcagatcgagctgatgaccaaggccagcacggggtacgccgacctggggaacaaccaccacatcgccatctaccggctggccgacggcaccgtggactacgacgccgtgagcctgctggaggccagccggcggaaggcccgccacgagcccgtggtgcgccgcgagcggggcgacggcgcccagttcgtgatgtccctgagccccggggacaccctgcagacctccgagaacggggaggccaagctgcgggtggtgaccggggtgtggagcaacggccagatcgtgatgtgcgacaacctggacgccgccaaggccaccgagacacgccccggcgccaagaccatcgtgagcagcgatgggcgcaaggtgagcgtggaccccatcggccggatccggccggccaacgac

SEQ ID NO: 154 - DNA, 4014 bp, synthetic construct
  source 1..4014: mol_type = other DNA
atggccaagatcctggggctggacctggggaccaacagcatcggctgggccgtgaccgagactgacgactaccagaacttcagcctcctggacaagggcgtgcgcatcttccaggagggcgtgaagatcgagaagggcgtcgagtccagcaaggccgccgagcggaccggcttcaggtccgcccggcggatcaagtaccgccggaagctgcggaagatcaacaccctggccgtgctggccaagtacggctactgccccgggatcgacaccgccgccctgcggaactggcggtacaagaagatctaccccagctccgagctgttccgcaactggcagaaaacggacgaggccacccagaagaacccctaccacttccgggccatcgccgcccagacccagctggacctgaccgacgagcacaaccggcagaagctgggccgggccttctaccacctggcccagcggcggggcttcctgtccaaccggctggaaaccaccaaggagaacaacggggcggtgatccaggccatcgacgagctgtccgaggccaaggcccagctgaccctgggccagtacttctaccagctgtacacccagaaggggaagatccggaagcactacacccaccgggagaagcactacctggaggagttcgagacaatctgccgggtgcagcagctgcccggggacttcaccagcgagctgcggaaggccatcttcttccagcggccgctgcggagccagaaggccctggtggggcactgccccttcgagaagaacaaggcccggtgccccatcagccacccggccttcgagcagttccggatgctggccttcatcaacagcatcaagatccagaccccgggcgacgagctgctgcgggccctctcccaggaggagaaaacccagatcgcgcccctgttctaccgcaagagcaaggagcacttcaacttcgaggagatcgccaagaagctgtgccccaagaacaccctgtacctctacttcaaggagaaggagaagcccgaggtgtgctaccagttcaactacagcatgaacagctccgtgagcgggtgccgcaccatcgcccagctgcgggagatcttcggcgaggactgggagaagtccatcaacgagcggtacaccctcaccaagcagaagaacggcaagaagtccagcgacgaggtgatcaacgacatctggcacgtgctgttcagcttcgacaagaccgagaagctgaaggagttcgccagcctgcggctggggctggagcagtccatggccgagaagttcgccgagatcaagctgaagcgggactacgccagcctgagcctgaaggccatccggaagatcaacccctacctgcaggagggcctgctgtacaaccacgccgtgttcctggccaagctggaggacctgatccccaggtccgtgtggtccgacgacgagaacaaggccctgatcaaggacgagatccggctgatcatcgagtcccagaactacgagaagcagatgaccgacctggtcaacggcatcgtgaagatcaaccgggacgaccaggcctcctggtccgagaacccctactggcaggaggccctgcagaacgacctgaacaagaagctggccagctactacggccagcggcggtgggacgagatgaacaccgacgacaaggacagcctgcgcaacgagctgttcatccgggtgaagaagcagatgcaggccaacctgggccgcggctccttcgccaagacccagaccatcgaggagcggatcaagaacttcatctccgaccagttcgagatcgacgagtcccagctggaggggatgtaccacccctccgccatcgaggtctaccgggaggcccggcggtccaacgacggcaactactacctggacagccccatgatctccgccgtgcggaaccccatggccatgcgcagcctgcaccagctgcgccgggtgatcaacgagctgctgaaggagggcaccatcgaccgggacaccaagatcaacatcgagatggcccgggacctgaagaacgccaacgagcggaaggccctgcagcggtggcagaaggcccgcgagaacgagcggaacgcctaccgggagcagctgaagaaggacatcctggccgccaccggcaaggagatcgagccctccgaccgggacctgctgaagtaccagctgtgggaggagcagaaccacatgtgcctctacaccggggcctacatcggcctcgccgagttcatcggcgacagcccgaagtacgacatcgagcacaccatcccccggtccctgtccttcgacaacagccaggagaacctgaccctgtgcgactcccggtacaaccgggaggtgaagcggaaccgcatccccagcgagctgcccgagcactcccagatcctggagcggctcaaggactgggagaaccgcatcgaggagactcagcggaacatcgacaaggccaagttccgctccaaggtgtccatcgagaagaaccgcaaggacaaggccatcgaggaccgccacttcttccagttcgagcacaactactggcaggggaagtacaagcggttcgtgatgaaggacgtgcccgagggcttcaagaactcccagctggtggacaccgggatcatcaccaagtacgcccggctgtacctcaagaccgtgttccggcaggtgaacacggtcaagggcaagaccgtggccgacttccgcaagctgtggggcatccaggacgagttcgagtccaaggagcggtccaaccacatccaccactgcatggacgccgtgacgatggcctgcatcagccaggacgcctaccagcgcctggccaaggcctaccacgactgggaggagaaccgccccatccagcggtccgacatgccccaggtggagaagccctggcccaccttcaccgaggagatcaagaagctggaggaggaggtgctggtgtcccactacacccccgacaacctgcccaaaaagaccaagaagatcctgcggatccgggggaagaagcagtacaacgagcagggcgagcccatctaccagcagggccacagcgtgcgggccagcctgcacaaggacacctgctacggcgccatcaagcagaccgcccccaacaagaaggggatcaccgaggagcagaccgtgtacgtggtgcgcaaggccgtggacagcctgaccgactccgacatccagaacatcgtggactgccggatccgcaccctggtggaggaggggaagaagcgggaggccgtgctgcggaaggagctggagaaggccgagaagcggctgcgggacgccgagctgcccgagatccaggagcagtggcagcacgaggtgcagtccctgcacgaggagatccggcggctctacgccatccccaaccacgacggctccttcacccccatcaagaaggtgcggtgcatcgcccgcaccgtgaccgacccggtgttccccaacaagaagcaccgggacgagcgcaagaagaagtccctgcagcagagccagaaggagtacaagcggttccgctactacgccaacgacggcaactacctgatcgccctgtaccagggcatcgacaacaagggcaagatccggcgggacttcatcgtgatcaacaacatgaccgccgccaagtacttcaacaacaacgacaacgagaacaccatccccgagatccaccccaagagcgggctgcccctgcagtacaccctcaagaccgggacgatgatcctggtgtggaaggactcccccgaggaggtgtggaagtccaacaagaaccccctgaccatccggctgtacaagctggtgaagttcgacaagagcggccggctgtacttccggccccacaccgaggcccggcccgccaacgagctgaaggaggagtacaccttcagcctggaccggttcgtggagcagctgtgcttcagcagctccaagttcaccgccctggtcgaggggtacgacttcaccatcagccccaccgggaagatcacccggctgaag

SEQ ID NO: 155 - DNA, 5658 bp, synthetic construct
  source 1..5658: mol_type = other DNA
atgaagaacatcctgggcctggacctgggcaccaacagcatcggctgggccctgatcgagatcgaccacgagaacgggatcgtgcggatcctgggcctgggcgcccggatcctgcccatggacgccgacgagatcaacgacttccagtccaaggggaccatcaagtccaccaccgcccagcggaccgacgaccggggcgtgcggcggaacaaggagcggttcctgctgcggcgggaccgcctgcacctgatcctgaacctgctgaacgccctgcccgagcactacaagatcgagatcgacttcgagcgcaacggggagaagtgcggccagttcaagaactacaaggagcccaagctggcctacatccggaaccgcgccaacgacaagcggttcgacttcctgttcgaggactcctacaacgagatgctgaacgagttcggcgtggagtacaagaagcggaagctgatcccccgggactggaccctgtactacctgcggcagaaggccctcacccagaagatcgccctggaggagctggcctgggtgctgctgtcgtacaaccagaagcgggggtacgagaagaacgaggtggaggacaagacctccaaggagaacgagatcgtggaggtcctggacctccgcgtgaagaacgtgaccgagatcgtggacaaggagggcggcaagtacttcaaggtggagctgaactgcatcgacaacatcatctacaacgagtacagcgacatccagatgaccttcgagaacgacctgaaggagatcaaggtgatcaccaagatcgacgacagcggcaacaccaccagcaaggagttctccgtgctggacatcttctccctgaagatcaaggaggtgaactacgagaagcaggaggacaagcacaactacaccatcacctacctgaacgggtggaaggagatcaagaccctgaagaagtacaccttcaggtacaagaacgtgatcaacaagcccttcgagtacatcgtggagacagtgtacgacgagaagggcaacatcaagcccatcctgggcaagttccgcaagctgcgggagcccgacttcggggacaacagcaacgactggaccctgctgaagaaaaagaccgagaaggaggccctggcctacaacatcgagaacgggtacatcaacaagaacaccggggagcccaagaagtacctgagcccccagatcttccacatcctgaagaacgacgcccagagcggcaaccgcaccaagatcatcggcggcatgttccaggtgatcgagcgcgagttctaccgggaggagctggcccagatcatcagcacccagaagcagtactacaccaacctgaacgaccgcaagaccttcgagaagtgcgtgcagctgctgtaccccaacaacgaggcccacgccaagagcctgatggccaacaagaaggccatccagcagctgctgatcgaggacatcctgctgtaccagcggcccctgaagtccaagaagtccgagatcgccaactgcaagtacgagatccggcagtggaaggacgccatcgacaaaaagacgggcaagcccgtggaggagatcgacatcgagacaggggagatctgcatcaagaaggagcccatctaccacaaggtggtgtccaccagccacccctacttccaggagttccggatctgggacaagctgcacaacctgcggctgatccagatcgagaaggaggccgaggggaagatcaagaccaacgtggacgtgaccgacgactacttcaagaacgacacctaccagaagctgttccagctgctgaacaacaagtccaccctgaagcagtccgggctgctggacttcctgaagtccaagttcgaggagaagaacgagaacgccaagaacttcgtgtggaacctgcccgagaacgaggagatcaagggcaacgagacacgggtgtccttcaccatccgcttcaagcggtgcgggctgaaggactacaacaagctgctgaccaaggacaaggagatcgccctgtggcactacctgtacagcgtgagctacaaggagcggatcgccgacgacttcaagtccatcaagtccttcttcagcaagttcctggacggcgtggacatccccgacatcgtgaaggacaacctgatcaaggacttcgcgaactaccccaagttcgcgagcaagtactgcgcctactccgagaaggccctgaagaagctgctgcccttcatccggatcggcgagttcaacgactccttcgacatcaccgagttcagcagcgacctgaacgccatcaactacgacaagtcgatgatcctgtcctacatcaagtacaaccccatcgaccgcatgaagctgagccccaaggagtccatcgacctggagatcaagcggcggaacctgtacaaggccatctgggagcacagcatcaacgagcggatcaaggagatccgcaagcgcctggacaccatcgacttcgaggtggacgaggtggacttctccaaggtggtgtccaacgactccaacaacgggaacatccccttccccaaggggctgttcaacgccttcaaggccctcaagacctccgacaagcccaaggagttcaccaacctgaacctggcccaggccagctacctggtgtacggccggcacagcgagctggcccaggccaagtactggaccagccccaagcagatccgggacgagctgcaccaggagctgaagctgcacagcctgaacaaccccgtcgccgagcgggtgatcctggagatgatccagatcgtggccgacatctgggactactacggcgacgggaaggacaagttcttcagcgagatccacctggaggtggggcgcgacctgaagaagtccgccaaggagaagcagaacatcatcaactaccagaacgagaacaaggcgcagaacaagcgcctgcggcaggtgctggaggacttcctgtccaagtccccctacaacgccatcccccagaacagcgaccacttcgagcggctgaaggtgatggaggacggggccgcccacaccaagaacaccgacaagaacttcttcatcgagaagtcctacaccaagaaggagatcgacgagatcctgaagaagcccaacatcacccagggggacttcgacaagtacaagctctggatcgagcagggctacaagtccccctacaccaaccgcatcatcaagctgacggacctgttcaacgggaacaagtacaacatcgaccacgtgttcccccaggccagcgtgaccaacgacagcctgatcaacaaggtggtgtgcgagcgggagatcaacaccctgaagtccaagcagaccggccgggacttcatcaacaacccctcccagcggcgcatcagctgcgaggcccacaagaccaaggagaaccccaagggcatcgtggagatcgtgaacgacaacacctacgtgagcatcgtcaagacccagttcagcggccacaagcggcagatcctgctgagcaaggagatccccgccaacttcaccaacagccagctgaacaacgcccggcacatcgcccgcaaggcgatggagctgctgagccacatcgtgcgggagcccggcgaggtggagttccgcagcaagaacgtgctgcccgtgaccggcgaggtgacctccaagctgaagaaggcctggcggctggacgaggtctggcgggagctggtggccccgcggttcatgcggatgaacgagctcaccaagagcaacctgttcggccaggagcagatctccaagagcggggccaagtacttcgactgcaacatcgacaacagcatccgggagaaggaccccagctacgacatcaagcggatcgaccaccggcaccacgccctggacgccctgatcgtggccctgtgcaccgaggaccacgtgaactacatcaacaacatcaacgccaacgtgacctccgaggaccacaggaagcagaagcagatcgagaagtaccgggaaaccctgaagcggaagatcatgttctccaagcccaacaaggagaaccccaaggtgaaggactggttctacatgctgcccggccagcggcgggaggccgaggccgaaaccagcaccatcgacaccgtcctgcgcatcttcttctacttcaaggacaccggcttcaacatggactacaagtctatggtgctgagcgccctggagcacaccatcgtgacctacaagcagaacctgcgggtgatcaacaagaccgtgaaccggtacaacaacacccccaacaagaacaagttcgagatccagaaggacaaggaggccgacaaccagtacaactgggccatccggcgctccctggggaaggacacctactacggcaaggtgaacctgaagctgaaggagaagaacaagctccacagcatgctggaggccatcttcgagaacgtgaccatcatcgtggacaaggagctgaagaagcagatcatcgagatcaaggccaacagcaacctgaagcacttcaagaagaagatcaaggagctgtaccgggacaaccccaccttcgacttctactacttcaccgacaccaccaaggacagcaagaagatcgccagccgcgagttcctgtccgacaagttctacagcaagaagatcctggagatcaccgacaccgggatccagaagatcctgctgaaccacctgaagcagttcgacaccgtgaagctgcgcttcgaggaggccctgcagtacttcgacgccctgaaggagaagcccgagctggagtccatcctgaacaagggggactccaagttcaacaccctcgacgacctgatcaactacctgaagtcccacgagaacaagtacgacaaggtggactacagcgagctgaacgtgttcatcgagcaggtgcacgaccgcgacttccgggccgatgagactttcaaggacatcatcgacgagcaccccgagatcgccttctccgtggaccagatcgacctgatgaaccaggccgagaacatcaagaagctgaacgacgggaagaaccacgcccccatccggaaggtgcgcagcagccggggcttcgggaaccagcggcaggtcagcgacgacctgcagagcgtgaagtccaagcagtacatcgtgaacgacgccggctccaacctgtacctgggcttctacgagggggtgtacgaggacaacaagatcaccgagcggaagttccaggacatcgggctgatggagctgatcgagatcctgaagcaggacaagagcaagcggctcaaccccctgccccagtccatcctggacgagcggaagaacaccgagtacaactggctgttcaccctgagccccctggacctggtgttcgtgcccaacgaggaggagatcgagaaccccagcctggtgaacctgaacatcctgaacaaggagcagatcaagcgggtgtacaccctgaacaacttcaccgggggcgacatctacttctcccccaactcccacgccaagtccatccacgagaaggaggtggacctgaagttcgacaccaagacctccaagctgaaggggtccttccccgacaagaccacctccatctcctccggctccaagaccaaccagatcaagaacatctgctacaagctggaggtggacaagctggggaacatccccaagcccaacaagctgcggatcgac

SEQ ID NO: 156 - DNA, 3189 bp, synthetic construct
  source 1..3189: mol_type = other DNA
atgcgggagcgcctgggcggcgccgacgccggcaagcgcagctaccggctgggcatcgacctgggcgccaactccctgggctggtccgtgatctggctggacgaggacaagcccaacgggctggggcccgccggcgtgcggatctacgccgacgggcgggacccccagtccaagacctccaacgccgtgacccggcgggtggcccggggcgcccgccggcggcgggaccggtacctggtccgccgcaaggccctgatggaggccctggtggccgccgggctgatgcccgccgacgcggccgccaggaaggccctggagcgcctggacccctacgacctgcgcgcccggggcctggacgaggccctggccctgacccacttcggccgggccctgttccacatcaaccagcggcggggcttcaagtccaaccgcaagaccgacgggcagaacgaggagaagggcgccatcgccgaggccggcaagcagctgcgcgagcagatgctggccgccggcgcccggaccctgggcgcctacctggcccggcggcacgcccggcgggaggccgtgcgggccaggaacgtgtccagcggcgccaaggccgcctacgacttctacccccagcgggccatgctggaggacgagttcgggcagctgtggcgggcccaggccaagtggcaccccgagctgacccaggccctgtacgaccagctgttcgagatcatcttctaccagcggcccctggtgagcccgcccgtcgggaagtgcgccctggaccccgccaagcagcccgacgacctggaggggttcaggtgcagctgggcccaccccctggcccagcgcttccgcatcctgcaggaggtgaacaacctggccgtgggcctggtgggggaggccaaggaggccctgtcccccgagcagcgccagaaggtgtacctgagcctgcgggccaagaagtccatgagcttcgacggcctgcggcggctgctcaagctcaccgccgagcagatcttcaacctggagagcgagaagcgctccaagctggagggcgaccagaccgcctggcggctggccgacaagaagcgcttcggcaaggcctggcacagctacgcccccgagcgccaggccgccatcgtggagcgcctgctggaggagcccgacgagcaggcgctggtggagtggctgatggccgagacaggcgtggaggaggcccgcgcctgggtgatcgccgactccccgctgcccgagtcccactgccggctggggctgcgggccctgaaggccctgctgcccctgatggaggccggcaagcgctaccacgaggccgccgccgaggcggggtacgaccacgcccggatgcccaccggggagatccgggaccggctgccctactacggcgagatcctgcaggaccacgtggtgggcagcggcgacagccgggaccccgccgagaagcggtggggccggctgcccaaccccaccgtgcacatcggcctgaaccagctgcggcgggtggtgaacgccctgatcaagcggcacgggccaccctcccaggtggtggtggagatggcccgggacttcaagctgagcccccaggccctgcggaagctggagctggagcaggccgccaaccagaagaagaacgaccggcggcgggagcagctggaggccctccggctgcccgtgaaccacgggaacctgctgaagctgcgcctgtgggaggagctgaacgagacagacgaggccgaccgcaagtgccccttcaccggggagacaatctccatccggcggctgctgtccgacgaggtggagatcgagcacctgatccccttctcccgcagctgggacgacagcgccgccaacaagaccgtgagcctgcggtccgccaaccgggccaaggggaacaagacccccttcgaggccttcggctcctcccccaccatcaacgggcgccactacgactgggagcagatcaccgcccgggccgccaacctgccggggaacaagcggtggaggttcgaccccgacgccctgcagcggttcgaggccggcggcgggttcctggcccgccagctgaacgaaaccagctggctggccaggctggcccgccagtacctggggtccgtgacggaccccaggcaggtgtgggtggtgcccggccggctgaccgccctgctgcggggcaagtgggggctgaacgacctgctgaacctggccggcggggtgaagaaccgcaacgaccaccggcaccacgccctggacgccctggtggccgggatgaccgaccggggcctgctgcagcgcatggcccgggagtacgacgaggtgcgggaccgcatcgaggtgtccgccccctgggtggggttccggcaggacgccgcccgggtgctggacgccatcctggtgtcccacaagcccgaccacggcgcccagggccagctgcacgaggacaccgcctacgggctgctggagccgcccgaggagggcggcaacctggtgtaccgcaaggccctgaaggacctgaacgagcgggagatcgggcggatccgggaccccgccctgcgctccgagctggagcacgccgtggccagcggcaaggccgccggcaaggccctgccggaggtgctgcaggccttcggcgtggcctgggggcagcggcacagccgcgccgcccccgggaaggagcacggggccctgcggcacgtgcggctgaccaaggtggagggcgccgactacctggtgtccatcgccgaccgggacgggcaggccttcaaggcctactccgccggggacaaccactgcgtggagatctacgagactcccgacggccggtgggagggcgaggccatcaccgtgttccaggccaaccgcggcgggtaccgggccgcctggcggaaggcccacccccaggcccggcccgtgatgcgggtgcacaagggcgactgcatccgcgtcgaaaccgaggccgggccggccttcctgatcgcccaccgcctggacgccgccgccaagcggttcaagctggccccgcacaacgaggccggcgccctggacaagcggcacaacgaccccgacgaccccttccgctggcgcatgttcagctacaacaagctgcggtccctgcaggccgcccgcgtgcggatcgacgaggtgggccggccctggcggcagaccgccaaggggcccggcagc

SEQ ID NO: 157 - DNA, 3366 bp, synthetic construct
  source 1..3366: mol_type = other DNA
atggaggtgaagaagatggcccggcacctgaccaccctgggcatcgacctggggaccaactccctgggctggtgcctggtggagacaatcggggagccgggcgaggccggcgagggccggatcgtcgacatcggcgcccgcatcttctccgccgccgacatggccggccgggacgccaagtccaaggagtccctggccgtggcccggcggctgggccggaccacccggcgccagcgcgaccggcgcctgcgccggaagtcccggctgctggaccagctgaccgagttcgggctgatgcccgccgagaagcccgcccgcgagcggctggtccgggagactggcgacaaggagggcggcgacctgagcgcctccgtgtacgccctccgggccaaggccctggacgaggccctgaccccgcacgagctggggcgggtgctgttccagctgaaccagcggcggggcttcaagtccaaccgcaagaccgacggcaaggacaacgacgccggcaagatcgccgtgggggtgtcccggctgcaccgggccatggacaccgagcgggcccgcacctacggcgagttcctgcacaagcggcggctggccggcaagagcgtgcggacccgcctgcggcccgagtccatggccgagttcgacaacgaccccgaggccaagggcgacgggtacgacttctacagcgaccggtccgagctcgagaacgagttcgaccagatcaccgccgcccaggcctcctaccaccccaccatcctgaccagcgagcggatcgccgtgctgcgggacaccatcctgttccagcggaacctggtgcccccgaaggtggggaagtgcagctacaaccccgacgaaacccggctgcccaaggcccaccccctgttccagcagttccggctgtacaaggaggtgaacgagctggccctgatcggcgaggaccagaaccccgtgaagctgacccccgaccagcgggacaccctggtcctcaagctgcgcaaggccaagaaggccaagttcaccgccctgcggaagctgctgaagctggggcccgagttccgcttcaacaaggaaaccgacagccggaccgagctggagggggacgtcgtgtccgccgccctgtcccacaagaactgcttcggccccaactggaccgccaagtccatcgacgagcagtggggcatcgtggagcagctgcggggcgagcccgaccccgacgcgctgctgaagtggctgtccgacagctgcgggctggacgacgaccgcatcgaggccgtgatgaaggtgtccctgcccgagggctacggccggctggggcccagcgccctggccaacctgctggacgccctcaagcacgacaccgacgacaacggccgggtgatcacggaggccgccgccgccatcgagatctacgggcggaccaacgccgaggacgaccccgaccgcaaggccgtcaagaccctgcccaagtaccaggaggtgctgacccggcacatcccgccgggggaggggtccgtgtccgagcccccggacaacgacgaccccgggtacgaccggcacatgggccggatcaccaaccccaccgtgcacatcgcgctgaaccagctgcggcgggtggtgaacgccatcatccgcaagcacggccggcccgaccgcatcgccatcgagctgggccgggagctgaagctcaccgacaagatgcgggaggaggtgaaccgcaccatcgcccgcaacaccaaggaggccgaggcccgcagcgacaagctgcaggagctcggccagcccgacaccgggtacaaccgcctgcggctgaagctgtgggaggagctgaaccccgaccagcccctgaaccgggtgtgcatctactccggcaagcccatcagcatgcgggaggtgttcaccgccgaggtggacgtggaccacatcctgccctacagcaagaccctggacgacagccaggccaacaagctgctgtgcaaggcccgggccaaccgggtgaagcgcaaccgcgcccccgccgaggtgggggagtgggacgccgtgtacgacgacatcctggcccgcgccggcaacctccccaagaacaagcagtggcggttcgcccggaacgccatggaccggttcgccgacgagaacgggttcgcggcccggcagctgaccgacatgcagtacacctcccgcatggccctgtcctacctggccgtgctgtaccccgccgagcaggccaacatcgacggggtgccccggcggcacaaccacatccgggccctgcccggccggatgaccgagatgctgcggcggaagtgggccctgaacgagatcctgcacgaccacaacttcggggaccccgtcaagcccaagaaccgcaaggaccaccggcaccacgccatcgacgccttcgtgatcgcctgcaccagccggtccctgatccagcggatcgccgccgccgccgaggagatcgaggccgagggcagcgagaaggtgctgggccgggtgcccgagccctggcccggcttccgggacgagctgcggcagaaggtgctggggtccgtggtcagccacaagcaggaccacggcaccatctcccaggccgggtacgccagcgggaagggcaagaccgccgggaagctgcacaacgacaccgcctacggcctgaccggcgagacagacgagaagggcaacgagctggtggtgcaccgcatgcccctggacgacttcaagtcccccaagcacctgatggccatccgggacgagcagctgcgggacaccctgtgggaggccacccgggacctgtccgggaaggacttcaagaaggccctgcgggacatctcctcctccgaccggctgaacggctccgtgaacccctacaaggagctgcggcgggtgcgggtgctggagcccctccagatcatccccatccgcaaccggtcggggaaggtgtacaaggggtacaagggcaactccaaccaccggtacgacgtgtggcagctgccgggcggcaagtgggtggcggaggtggtgtccaccttcgacgcccaccagcccgggtggacctccaaggtgcgcggggacaaccccaccgccaagaaggtgctgtccctgcagcagaacgatatggtggccatcgagcgcgacaacggccgccagatctgccgggtggtgaagttcagctccgccgggcagctgaccctggccgagcacaacgaggccggggccctgaaggcccgggacgccgacaagaccgaccccttcaagtacgtgtacacctccggcaccgggctggggaagctgcgcgcccggcaggtccggatcgacgagatcggccaggtgttcgaccccggcccccactggaccgacaagaac

SEQ ID NO: 158 - DNA, 3027 bp, synthetic construct
  source 1..3027: mol_type = other DNA
atgaagtccaccgtgctggggctggacctcggcaccaactccatcgggtgggccctgatggagcggaacgaggagaacaaccccgtgggcatcatcgactgcggggtgcggatcttccaggaggccgtggaggccaagacccgcacccccaagaacgtgaagcggcgggaggcccgggccgcccgccgcctcacccagcggcggacgatgcggaagcggaccctgaagaacgccctgatccgcatcgagctgctgcccgacaacatggaggagtgcgacaccatcctgcggaacaccgtggagtacgacccctacctgctgcgggcgcgcggcctggacgagaagctgacccccttcgagctgggccgcgccctgtaccacatgaaccagcgccggggcttcctgtccaacaggaagtccggcaagaagaaggacgaggggcccgtgaagcagtccatccagtacatcgagaagcagatggagcagtccgggtaccgcaccctgggggagtacctgttccaccaggaggagaagcggaaccggcggactgactccaagctgtcccagaagcagaccgagatcctgaccttcaccgcccggtccatgtacgagaaggagttcgacctgctctgggagagccagcggcacttctaccccgagcagctgaccgacgccaagaagaacaccatctacaagatcatcttcttccagcggccgctgcggatccagaagcacctgatcgggtactgccgcttcgagcccgggaagcaccgggccgccaaggccaccctgaccgcccagcggttccggatcctgcaggacgtgaacaacctgcagatcaagaacccgctgacccgcgagttccggcccctgaccgagcaggagcggagcatcaccctgcgggagctggacaagaccaagaagctggagtggaaaaccctccggcggaagctgggcatccacgagggcgagctgttcaacctggagaacggcggcaagccccacctgcccggcaacagcaccgccaccaccttccggggcgtgctgaagaaggagtgggaccagttctccgagaagcagcaggagcagctggtcaccgacatcctgaccatcgatgatgagaacgggttcctgaaccgcatgaaggaccactggaacttcagcgacgagatcgccaacaagctggccaccaccgagctggtgaacggctacgtggccctctcccagaaggccatgaagcggatcatccccttcctggagaaggggctgacctacgacaaggcctgcgaggaggtgggctacaaccacaccgaccagaagtccagcaagggccacctggagttcctggacagccctcccagcatccccaacccggtggtgcagaaggccctctgggaggtgcggaaggtgatgaacgccctgatccggaagtacgggaagcccgccctgatccggatcgagatggcccgcgagatgaagcagggcaagaagctgcgggacgccaccaacaagcggaaccgcgagatggagacataccacaagaagatcaaggagcggctgcagagcgagatgaacatgcagcagccgacccgggacgacatcctgaagtacaagctgtgggacgagtgcgggatgacctgcccctacacggggaagcccatcagcctgagcatgctgttcagccccgaggtggagatcgagcacatcatcccgtactcccgcagcctggacgacagctacatgaacaagaccctgtgcctgacccacgagaacaccaacgtgaagaagaacatgaccccctacgaggcctactcccacgacgagaagcgctaccgggagatcctgctgcggatcgacaaggaccacatgcccaagatgccctggcccaagcggaagctgttcgagaagaaggaggtggacaccgaccacttcatcaaccggcagctgaccgacacctcctacatctgcaacgaggtgaaggagtacgtgaagcggctgggcgtggacgtggacgtgaccaagggcggcgccaccgccggcctgcggatgcactggaacctgaacaccatcctggcccggcagcccggcgagactgccaaggagcggtccgaccaccggcaccacgccatcgacgccatcgtcaccaccctgaccacccggtccatgttccagttcctgagccggatcgccaagtccgccccctacatgggcgggctgtacgaccggcggttccagatcccgcccccgtacgagggcttccgggacgacgtgtactgccagatccagaagatcgtggtgagccacgccgcgtcccggaagatctccggggccctccacgaggagacagccctggggctggccggggagggcaagaagtccgggtacgtggagctggtgcaccgcatccccctgaacgggaacatcaccaagaaccagatcgaggccatccgggacgaccacgtgaaggccatcgtgaagcggcggctggccgagttcagcgacgaccccaagaaggccttcgcggacaccgtgttccacaaggacggcaagacccccatccacaccgtgcggatcaccgaggagaagtccatggacaccctgaccagcgtgaaggacaagtacgacatgccctacaagtacttcgccctgggcagcaaccaccacgtggagatcttcgagaacgaggagacagggaagcggaaggggatcttcgtgtccgtgatggaggccgcccggcgggtgcggatcgaccacacccccttgttcgaccgcagctacaaggaggggtggcgcttcgtgatgaccctgatgatcaacgatatggtcatcgtggacgtggacggcgagaaccgcatctaccgcgtccagaagatgaccggcgccggggccaagagcgagatgaccctgcgcgcccacaccgcctccaccctgacctacgacaacgagcggctgatcaagacccccaacaccctgcagtgcaagaagatcagcgtggaccccatcggccagatccgccggtgcaacgac

SEQ ID NO: 159 - DNA, 3291 bp, synthetic construct
  source 1..3291: mol_type = other DNA
atggtggccgtgaacctgggccgccgcaccatcctggggctggacctgggggtgaccagcgtgggctgggccctgatcgagtacgacgggcagaagcccgtgaagatcctggccaccggggtgcggcacttcgacaccgccgccaccaacgccaaggacttcgccgccggcacccacaagaccaagaacgccgaccggcggcggccccagcgccacatgcggcggcagctgaaccgccgcaagcagcggaagaagcaggccttccaggccctgcaggccgccggcctgctgcccgctgccagcgccacctccgaggaccagcgccacaagatcatccgccaggtggacggccgcctgcggcggaagtggatggtgaagggcgaccaccgcaagcagcagctgctgccctacctgctgcgggacgccgccacccggcggcaggtgaccgccgaggagctgggccgggccctgtaccacctggcccagcgccgcggcttcaagtccaaccgcaagaccgaccgggacgaggacgacaagtccacggtgtacgagggcatcggcaccctggagtccgagctccaggccgccggctgcgagacttacggccagtacttcgccaccctggacccccagcggaacggctgccggatccgggggcggtacacctcccgccagcactacgagcgggagttcgacaagatcatcgacgcccagcggcccttccacccccagctggcccagcacgccaaggccatccggcgggccatcttcttccagaaccccctgaagtcccagcggcggttcctgggcagctgcgagctgtacgggaaccgccgccgggcccccaaggcctgcctggccttccagtgcttccggatctgccagcaggtgaacaacctgtccctggtgctgcccaacggctaccgccagcccctggcccccgaggagcgggaaaccctgtacaaggccctgcagggcaagcacaagctgacctcggccggggtgctgaaggagctggggttcaagcggaactccgggcacgccatccacgggatcggcgagtccgggaaggagatcatcggcaaccgcaccgcctgcgagctgcggggcgccctgggcgacgtgtgggacggcctgcgcgacgagcagcaggcccggctggtggacgagatcacccagttcaccaaccccgaggccctcgcccgccggctggccaaggagttcgggctctccctgcagcaggccacggccgccgcccgggcccggatcgagggcgactacgcctcctactcccgggtggccctgcaggagctgctgcccctgctgaaggccgggcggaccctgcccagcgccatcgaggaggtgtgcggccacagccggcggccccgggcccaggtggccaccgagcggggcggccggcacagccggaaccccgagacacccctgctgcccccgctcggggccacccggtgcggccgccacgtgcggaaccccgtggtgatccgctgcctgaccgagctgcggaaggtggtgaaccacatcctgcgggaccccgccctggggcggcccgacgagatccgcatcgagctgatgcgggacctgaagcggtcccgcaaggtgcgggaggcccgccaccgcaccatcaagaagaacaccgaccgcaacaagcagatcgagcacgagctgcagacccagcccgagacagagcggttcttccggaccgccccgccccggcggtccgacgtggacaagtggaagctctacgaggagtgccagggcatgtgcccctacaccgggcaggagatcagccccggggacctgtacgggcccaacccccagttcgacgtggagcacatcgtgcccgcctcccggttccccgacaacagcctggccaacaagaccctgtgcgagcacaaggagaaccgggagcggaagaagggccagaccccctgggaggcctaccacgagactgaccagtacgcccacatcctgcggcgcgtgaaggccttcaagggccccctgtccgcccggaagctggagctgttccagcggaaggagctgcccgcccagatgtccgcccagcagctggtggacagccagtactccgccgccctggcggccgagtacctgggcgaggtctacggcgggcaggtggacagcgccgggcggcggcgcgtgagcgcctccaacgggcgggtgaccgcccacctgcgggcgctgtggcgcctgaacgagatcctcggcagcgagagcgccgagaagaaccgggccgacctgcggcaccacgccgtggacgccctggtggtggccctgaccacccccggggccgtggccgccctggcccggttcgtccaggagggcgagagcctgggcctggacaacccgttcgccgcccggcaccggcggcgggccaagcccttcgacctgccctgggccgccttccgggaggaggccgagcgggagatcctgagcatcgtggtgtcccaccggcccgagcaccggctgcgggggcagctgcacaaggacacgatgtacggcgcccccggccggcgcggggccgaggaccccaaccggcccacccagcgggtcgccctgtgcgacctgtcccggaaggccatcgagggcaacgtgctggtgagccccctggtgcgccggtgcgtgctggagaagctgcggagcctcgaccagccgggcaagcccgccagccccgaggtgttcaaggacaccgccaacctgcccgagtaccccgggcggaacgggcagagcccccacatcatccggcgggtcaagacctaccggtccgcctccaagaccatccacgtgcggaacgggaaccccgggggccggtacgagcccggcggcaaccaccacgtgcccatcctggtggaggtggacgacgccgggcacgagaagcacgacggggagggccgctccctgctgagcttcgggaaggtggtgtcccggttcgacgccgtgcggcggctgacccaggacaacaccgaggtggtgaaccgggtgtacgaccccggcctgcggctgaagttcaccctgatgcggggcgacctggtggagatggccgacgacgacaaggtgcggcgcatctaccgcatgatgaacctgtccgacggggactaccggttccgggccgtgcacctggccgagggggacaacaactccctcaaggagcggcgcgacctgtaccagcggatccgctccaacaccgacttcagcaagcggttcccccgcaaggtgatcgtggaccccctgggccgcgtgcacaacagcgggggc

SEQ ID NO: 160 - DNA, 4206 bp, synthetic construct
  source 1..4206: mol_type = other DNA
atgtccaacaactactacctggggctggactgcggcaccagctccatcggctgggccgtgaccgacgagacatacaacatccagaaggccaagggcaagagcctgtggggcatccggctgttcgagaacgccaagagcgccgaggagcgccgcgggttccgggccacccggcggaacacctaccgcacccgggcccggctggacctgctggacgagctgttcgagaacgagatcgacaagatcgacccccagttcttccagcggctgaaggacagcaagtactacttcgaggacaagaacaacatcaacgacaagaacaccctgttcaacgacaccaacttcaacgacatccacttccacaagaagtaccccaccatcttccacctgcggagcgagctgatccacagcaacaagaagcacgacatccgcctggtgtacctggccatccaccacatcctgaagaaccgggggcacttcatctacgaggggcagcagatcgagaacgtgcagaacgtggagaacctgttccagaacctgaagctgatcttcagcgacctgttccccgacatcaccatcagctaccccaacgggatcagcgagatcgagaacatcctgaccaacaagaccatcaacaacaagctgaaggagctgaagtacaacatcagcgtggacagcgacaacgagaagatcgccaagtccatccagaccgagatcaccaaggccctgaacggcaacaaggtgaacatcctgaagctgatccccatcaccaccctgtccgaggaggacctggagtacaaggacttcagcttcagctccagctcctacgaggaccaggagctggccatcaagaacaccctcggcctggacaacttcgagatcatctcctgcctgaaggagatctacgactgggccctgctgttcagcatcctgcagggcaagcactacatctccgacagcaagatccagacctacaacgagcacaagaagcagctgatcgagctgaagaagctgatcaagaagtactgtcccgagaagtactccgaggccttccactccaccaaggacaagctgttcaactacagcgcctacatcggccacggcctggacaacgggaagaagaacaagggcgagatcaagtccaagtgcaccatcgaggacgtgaacaagtacttcaagaagctgctggagaacgcccacaagaagtacaacgaggacaagctgctgaacgagatctacagcaagctggagacaaacagcctgctgcagaaggccatcaacagcgacaaccgggtgatcccctaccaggtgaacctgatcgagctggagacaatcctgaagaacgccaccaagtacctgaccttcctgaacgagaaggacaacgaggggtactccatcaacgagaagatcatcgccatcatgaagttccggatcccctactacgtggggcccctggtggagaaaaccaacgacaacaaggagtaccagaagttctcctggatgatccggaaggagaactccaccggcaagatcctgccgtggaagttcaccgaccaggtggacctggccgcctgcgggaacgagttcatcaagcggatggcccggaagtgcacgtacctgcccaacgagaacgtgctgcccaagaactccctgctgaacagcgagttcaccgtgctgaacgagatcaacaacctgaagatcaacggggagaagccctccctggacctgaagaacgagatcttcaacctgttcaagaacttcaagaccgtgtccaccaaccgcatcaaggacctgatcatctccaaggggatcttcaacaagcggacggagatcatcttctccgggatcgacaagaccttcaagtccagcctgagctcctacatcgacttcaaggagatcatcgagagcgagaagctctccatccccgagatcgagctgatcatcgagtgggccaccgtgttcagcgagggccagaagatcctgaaggagaagatcgaggagaacttcgagaacaagctcgacgagaaggacatcaagtacatcctgtccaagtgccgcgcctactccgggtgggggcacctgtcccgcaagttcctgaccgagatgtaccacatcgacgagtacggggagtgcaagaacatcatcaacctgatgaaggagacatccaacaacctgatggagctgatgtccatcaactacaccatcagcaagtccgtggaggaggagctgatgaactacaacaacgactacgacacctggagctacgagaacctgatcgccccgctcccggtgtccccgctgatcaagcggagcatctggcagaccatcaagatcgtgaacgagatccggcaggtgaccaagaaggaccccaagaagatcttcatcgagatggcccgcgggcccgaggagaaccagatcaaccagcggaccaactcccggaagaacaacctgatcttccagtacaagaacctcaccgagaacgaggaggccctgaacatcctgaagtccctggagaacaagtccgacgccgacctgcggaaggacaagctgtacctgtacttcacccagttcgggcggtgcatgtacagcaacgagaagatcaacctggacgacctgctgatctccaacaagtacgacatcgaccacatctacccccagaagaacatcaaggacgacagcctgaacaaccgggtgctcgtcctgaaggaggagaacgggaagaagtccgacaggtaccccctgtccatcgacatccagaacaagtgcaagagccactggaccttcctgtacaagaacaacctgatcaccaaggagaagtacaaccggctgatccgcaagaccaagctggacaactccgagctggagtccttcatcgcccgccagatcgtggagacacgccagagcaccaaggccatcgccaagctgctggagaagctgtgcccctccagcagcatcatctacagcaaggccaacagcgtggcccagttcaagaaggactaccacatctacaagtcccggagcgtgaacgacctgcaccacgccaaggacgcctacctgaacatcgtggtgggcaacgcctactacacgaagttcaccaaggaccccaagttcatcctgaagaacgagaacaaggacagctacaacatcagcaagctgttctactacgacatcaagcggaacaactactacgcctggcacatggacgtgaacgggaaggcccgccgggaggagaagaaccagaaggagaactcccaggacttcctgaagttccccgagactggcaccatcgtgcgggtccgggagactctgagcaagaacaacatcctgttcacccggcagaccttccagcgctccgggaagctgtccgacagcctgatcgtgaagaagggcgccaacaacgacgtgctgcccatcaagtccagcgacatcaagatgctggacgtggagaagtacggcggctacaacaagatcgccaaggcgtacttcttcatcgccgagtacaccaacaacaacaagcggatcaagcggttcttcgacatccccatctacaaggccagcgagatcgagaacggcaagaccaccctgtacgagtactgcatcaacatcctggagctgaaggaccccaagatcatcatccccaaggtgctgatcaacaccaagatcaagatcaacgacttcctgtacgagatctccggggccatgggggacgccatcggcctcaagaccgccatccccctgatcatcagcaacaagaactacaactactacttctacctggagaagtacctggagaagatgaagaactacctgcggttcaacaagaacatcagcgaggaggagctgaccagcttctccgagaaccagatgttcaagtacaagatcagctccgagaagaacctggagctgtacaacgagctgaacgacaagctgaagaacagcatcttcaagaacagggtgtccaacagcatcaagaacaacttcgaggagaacatcgacctgttcatcaactcctccatctacaaccaggccatcttcctggagcagttcatcaccctgttcgcctgcaagtacgggaacgtggacctgaccctgatcaagggggccaagaacagcgggacccccaagatcagccggaacatcaactccaacatcaccttcatctaccagagcatcaccggcatctacgagagccggaaggaggtgaagatc

SEQ ID NO: 161 - DNA, 3270 bp, synthetic construct
  source 1..3270: mol_type = other DNA
atggcccgcatcctgggcctggacctggggaccaactccatcggctgggccctgatcgacgacaaggagaacaagatcatcaacaccggggtgcggatcttccaggagggcatcaaccgggacaccaagggcggcgagctctccaagaacgagactcgccgcaacgcccgccagctgcggaagcagtacttccgcaggagcctgcggaagaagctgctgctgaagatcctgaaggagaaccagatgtgccccatcgaggagaacgacttctccacctggatcaagatgaacccctacaagctgcgggccctggccatccacagcaagctgagcctgaccgagatcgggcggatcttcttccacatcgcccagcggcgggggttcaagtcctcccggaagtccgggaaggaggacgggaagatctactccgggctgaaggagagcgggaccatcgggatcgaccagacccaggagaacatcgccaaggggtaccacaccctgggcgagtacctggcgtccatcgaccccagcgaggagcgcctgcgcaaccgctacaccacccggcggatgtacgagcaggagttcgagctgatctgggacaagcaggcccagttccaccccaagaccttcacccacagcctgaaggacaagctggggtacgagaaggaggggatcatcttctaccagcggaagctgaagtcccagaaaaccaacatcgggaagtgcaccctggagcccaacaagcaccggtgccccatcagcacccccgtgtacgaggagttccgcacctggcagttcatcaacaccatccagtacgaccagaagcggctctccaacgacgagcgggaggtggcctcccagttcttcttcaacaaggccagcttcaagttcagcgagctgaagaagaagctgggcctgtccgagtacaacttcaactacgacgacgaccagaagatccccggcacctccaccatctccaccttccggaagctgttcaccaccaacatctgggaggccaagaccgacaaggagaaggacatcatctggcacatcttcttcagcgccgaggacaccgactggctggaggagtacgccaagaccaactggaacttcgaccagaaaacctcggccaagctgaagaacatcaacctcaagcaggactacagcaacctgtcccggaaggccatcaacaacatcctgcccttcctgaagaagggctacctgtacaacgacgccgtggtgctgggcggcatccgcaacgccatcggcggcgagaagttcgacgccctggaggaaaccgagtacaacatgatcatcgacggctacttcgccgccaagaagttcaagaacaaggagggcgagctgatcgagctcgtgaagaacttcctgatcgaccactaccacctgaacgacaaggccctgaagaagctgtaccaccacagccaggacaccgagtccatgctggtggtgtccaagctgcccgagcccgagaacctgcggaaccccatcgcccagcaggccatcttcgagctgcggaccctgatcaacaagctgatcgagaactacgggaagcccgacaccatcaacgtggagatggcccgggacctgaagtcctccaagaagcagcgggacgagtaccggttcaaccagcggcggaaccaggagaagaacgacgaggcccgggtggaggtggagaagttcggcctgaagccctcccggaacaacatccagaagtacctgctgtggaaggagctggaggccaagaacggcatcgccgtgtgcccctacaccggcaagaccatcaacgaggaggacgccctgggggagaacaacaagttccagatcgagcacatcatcccctacagcgtcagcctcgacgactccttcgccaacaagaccctgtgcgacgccaaggagaaccagaagaagggggacaagaccccctaccagttctacggcggggacaagaaggactggcagatgcggtccgagcgggccttcaagctgctgccctaccacaaggccaagaagttcgtgtccaccaaggagttccagctggacgacttcatccagcggcagctgaacgacacccggatcatctccaaggccgccaaggactacctgaagcagctgggggtgaaggtgtccgtgctgcccgggcagctcacctccgagctgcggtccaagtggggcctgaacaacatcctgaaccccgaggaggggaagaaaacccgggacgaccaccggcaccacgccatcgacgccctgaccgtggccgccaccaagcagtccttcctgcaggagatgtccaagtggaacaagtacaacaagtcctacgacctgaaggacttccccaagccctggaagtccttcttcgaggacacccagaccagcatcaacaacgtgctggtcagctaccacaagcagcaccgcaccatcaccaaggccaacaagaccatcaagaaggacggcaagaagtacaagtccagcggcatctccgcccggggccagctgcacaaggagactgtgtacgggcagcacctgagcagcaacggggagaagtactaccacgtgcggaagcccctgaacaccatcgacaacaaggccaaggtcgacaagatcgtggacccgatggtgcgcagcatcatcgagtccttcctgcgggggaagggcatcaacgtggacgagaagtacaagctggacaaggacatcttcttcaagatcaacgaggacaccgggcagaaggagacactgatctacctgcccaacaagaacgggtcccccatccccgtgaagaaggtgcggatcaaggagttcagcaccggcgccgtgaagctgaaggaccacatcaaccagtgggtggagcccgggaacaaccaccacatctccatctacaagaacggcgacgcctacgtggaggaggtggtgaccttctgggaggccgtggagcggaagaagcagggcctccccgtgatcaacaagacccccaagaacgggaacgagttcgagtgcagcctgcagatcaacgacctgttcctgctgaacatcaacgaggtggacatcaactgggagaagcccgaccagaactacctgtccaagttcctgtaccgggtgcagaagctgagcgccagctactacaccttccggcaccacctggccgccaccctggagtacaaggacgaggagatcaccatccagagcttcaaggcctggaagggccacaaccccctgaaggtgaagatcaaccacttcggggagatctcccggttc

SEQ ID NO: 162 - DNA, 4065 bp, synthetic construct
  source 1..4065: mol_type = other DNA
atgtccaagatcctgggcctggacctgggcaccaactccatcggctgggccgtggtggagacagagaacaacaagaccttctccctgaagaacaagggggtgcggatcttccaggagggcgtgaagatcgagaagggcgtggagggctccaaggccgccgagcggaccggctaccggtccgctcggcggctgaagttccggcgcaagctccggaagatcgaggtcctgaaggccctgatcaagtacgacctgtgcccgcccatcagcggcgacgagctgaacatctggcggtacaagaagatctaccccaccaacaaggagttccgcaactggtggctgaccgacaacaacgacaaccgggccgaccgcaagaagcagaccaagaacccctactactaccggtccaaggtggccaccgaccagctggacctgaccaagcaggaggaccggtacatcctgggccgggccttctaccacatggcccagcggcgggggttcctgtccaaccgcctggagaacaccaaggagtccgacggggccgtgacccagaacatcaagcagatcaaccagcagaagggggacctgaccctgggccagtacttctaccagtgctactgcaagggcgagaagatccggaaccagtacaccgaccgcctggagcactacgagcaggagttcaaccacatctgcaagctgcagggggtcagcgacgagcagaagaacaccctgcacaaggccatcttctaccagcggcccctgaagtcccagaaggggctgatcggcaagtgccccttcgagcccaagaagtcccgggtggccatcagccacccggccttcgaggagtaccgcatgctgtgcttcgtgaacagcatcaagatcaagctgcccgaggacgacaagctgcggttcctgaccgagaaggagcgggagaagatcatccccgtgttctaccgcaagagcaagccccacttcgacttcgaggacatcgccaagcagctggcccccgccaagcagtacaagttctacaaggccaaggacaagaaccccgaggactacctgttcaacttcaacatgaaaaccaccgtgagcgggtgcccagtgtccgcccggctgaagtccatcttcggcgacgagtggaaggagctgcagatcaagcacgagcggaaggaccactccaagtccatcatcgacatctacgacgtgtggcacgtgctgatgacctacgacagcgaggacaagctgttcgagttcgccaagtgcaagctgggcctgggggaggacaagacgaaggagttcgtccagttcaacctcccccagggctacggctccctgagcctgaaggccatcaacaagatcctgcccttcctgcagatgggcctgatctacagccacgccgtgttcctggccaacatggccaacgtgatcccgcccatcctctggaacgacccagagaacaagcagctgatcatcaacgagatcaaggagctgatccagagccagaacgaggagaagcagatcaccgacatcgtgaacggcctgatcaagatcaacaaggacagcaacgccgtgtggtccaacgaggccgagaaggccttcaagaacgacctgctgcagaacatcaaggcctactacggcagcaccaagttcgacagcttctccatcgcccagaagtccagcatcgagactaacgccttcgagctgctcaagacccagatgcagaagaagaacggcgtgggcgagttcgccaaggtgaagcgcatcgacgagcgcatcaaggacttcctgatcgacaacttcaacgacgacatcaagcccgagaacctgtaccaccccagcgccatcgaaaccttcaagcccgcccagaagaacaacgaggacaagtacctgctggggagccccatcaccagcagcgtgcggaaccccatggccatgcgggccctgcaccagctgcggaagctgatcaaccagctgatcaacgacgacgtgatcgatgaggacaccatcatcaacatcgagatggcccgggacctgatgaacgccaacgagcggaaggcgctgcagaactggcagcgccgccgggaggacgagcggaagaagtacgccgccgagatcgtgaagcactacaaggcctccggcatcaacgccgagcccagcaacaacgacatcctgaagtaccagctgtgggaggagcagaaccacatctgcctgtacaccggcaagaacatcgccctgcaccagttcctgggcagcaaccccgagttcgacatcgagcacaccatcccccagagcctgagcttcgacaactcccaggtgaacatcaccctgtgcgacagcaagtacaaccgcaccgtgaagcggaacaagatcccctacgagctgaacaaccccgacatcctgctgcggatccaccactggaagaaggagtacgagaacatcgacaaggacatccagaagtgcatcaagaacgcccggggcgcctccaccaaggaggacaaggaccggcacatcatccgccggcaccagctgaccacccagcggaactacatccgggagaagtaccagagcttcacccggaaggacgtgcccagcggcttcaagaacagccagctggtggacatcgggctgatcaccaagtacgcccggctgtacctcaagaccgtgttcgaccgggtgaacacggtcaaggggaccaccgtggccgacttccggaagctgtggggcctgcagaacgcctacgagacaaaggcccgggtgaaccacatccaccactgcatcgacgccatcaccatcgcctgcatgaccaagccccagtacgacaagctggccaagttctaccacgactgggagtgcctgaaggaggagggcgtcgacaagaagcccgtgttcgagaagccctggcccaccttcaccgaggacgtgaaggggatcgagaacgagatcctgatctcccactacacccccgacagcttcgccaagcagagcaagaagctgctgcggaagcgggggatcatccagaaggacaagaacgggaaccccatcgtgctgaagggggacaccgtgcggggcagcctgcacaaggagacattctacggggccatcgagcgcacccaggccaacaagaagggcgagctggagaaggtgatcaagtacgtggtgcggaagaaggtgagcgacctgtccgacaccgacgtgaagaacatcgtggacgaccgcatccgggagatcgtgggcaacgcccgcaacgaggagaagaagatccagaaggagatcgagcggctgaagaaggacctgcagaaggccgaggagcacgaggagcccgccatcaacgacaagatctgcgtgctccagaccgagatcgagcagctgtacagcctgcccaacaagaagggcgtgcccatccccatcaagaaggtgcggctgctgcagcccagcgtgaccaaccccctctgcatcaagaagcagagggacgtgagcaccaagaagcccaaggagtacaagcagaactactacgccgccaacgacggcaactacctgatggccatctacgagggcaaggacgccaagggcaagatcaagcgggacttcgagatcgtgaacaacatcaccgccggcgagttcttcaagcagtccgtgcagggggacctgaagccccagggcatcagcaccaacggcgggctgatccccaagcagaaggagaacgggaagctggtgctgccctacaagagcagcatcaagatcgggacgatgatcatcctgtgggagaagtctcccacagaggtgttcgacctggagctgaacgagatcaagcggcggctctacaaggtcgtgggcctgagcgcccagaagctgaagatcagcggcaagtcctacaactacgccaccatcgtgctgcggcaccaccaggaggccagcagcagctccgatctcaagacctacgacggcgccttcaagcgcgacgagacatacatgggccagcggaagctgaaccacaaccagttcaacgccctggtggagaacatcgacttcgacatgaacaccaagggcaccatcaagtggatcaagcac

SEQ ID NO: 163 - DNA, 4722 bp, synthetic construct
  source 1..4722: mol_type = other DNA
atggccaagatcctgggcctggacctgggcaccaacagcatcggctgggccgtggtggactccgacacccagaagatcctgaacaccggggtccggatcttccccgagggggtggagcccaagaccatcggccagggcgacaaggagcagtccaagaacgccacccggcgcgacaagcgccagatgcggcggcagttctaccgcaagcggctgcggaagatcaagctgctgcaggtgctcatccagcaggagatgtgccccctgaccatcgacgggctgagcaagtggaagaactggtcccggaccgagaaggccgagggccggaagttccccgacagcgagaagttcatcgactggatcaagctcaacccgtacgacctgcgggagaaggccctggaggaggagctgaccctgcacgagctggggcgcatcttctaccacctgatccagcggcggggcttcctgtccaaccgcaagggcacggaggactccaccatcttcaccaaggggaagcccgacgagaacatcctgcccatcaacgacaccaaggccaagatcggcaaccgcaccctgggcggctacctgaacagcatcgcctgcaaggacggggagccctacaagaacatcaccgacgagaacggcaaggagatccgggtgcggggccggtacaccgtgcgggacatgtacatcgacgagttcgagaagatctggagcgtccagaaggagttcctggagatcgacaacaagaaggtggaggccaagcgggcccgggagctgcgggggaccgtgaacaacaagcggaacaagaacaagatcgaccacctgaagatcaagttcggcgagtccaacgtggacatcaagatcgacgacaagggcaagaccaaggtgatcaccaccgagcacatctccctgaaggagttcctggccggccggatcgaccgcatcaaggacgaggccggcgaggaaaccctgcagttcaagtccaacgagtcggtgctgttctggcagcggcccctgcggagccagaaggggctgctgtccaactgccgcttcgaggacaacctgcccgtgatcaaggagaacggggacttcctgctgaagcccaacggcgagcggcagacccggggcaagaagccctgccccatctcccaccccgagttcgagctgttccgggcctaccagttcgtgaacaacatcagctacgggaagaaccagaagctgacccccgagcagaagaaggaggtgctggccctgatcaacaagaacgacgggaacttcgacttctccaagatcccggacgccctgaagctgaactacgagaagttcaactacggggacaagcagaaggtggccggcaaccccaccatcaaggccctgaagcccctgttcagcgacgacatctgggacaagcactacgaggagatctggcactgcttctacttctacgaggacaacgacaagctgttcgagaagctgaagaaggacttcggcttcaagaaggacatcgaggccgtgaagaaggtgcggatcaaggtgggctacagcaacgtgagcctgaaggccatccgcaacatcctgcccttcctggagaagggctaccagtacgaccgggccgtgatcctgggcggcgtgaagaacgccttcgggaagcggtgggagttcttcaaggagttccacgacaacatcgagaaggagatcctgtccatcctgcgggaggagaacaaggacggggaggccatcgagaagatcaaggagcacctggcctcccccgtgttcaactacggcttcgagaaggacgacccccacttcctgcacctgtaccaccacagccaggaggtggagaagcaggacgagctgaactccctggtgcccatcgtggagaacctccgcaaccccatcgtgcagcaggggctgaacgagactcggcgcctggtgaactacctggtgcagaagtaccagaaggagttcgggagcggcttccacttcgaccagatcaaggtggagatggggcgggagctgcggaacaacaaggacggccggcaggagatgtccttccggatccgcgagaacgaggccaagaacgacgacgcccggcagcggctggccgagtacggcctgcagcccagccgggagaacatccagaagtacctgatgttcaaggagatcgaggagcgctccggcaaggcccagtgcccctacaccggcaaggtgatctccgtgtccgacctgctgggccgggacaacgccgtgcagatcgagcacatcatccccttctccgtgagcctggacgacagcttcggcaacaagaccctgtgcgaggccaacttcaaccgggagaagtccgagaaaacgccctacctgttctacaaggagaaccccgaccccaacctgtggggcgtgacctcctgggaggccgtggaggagcgggccttccgcctgctgccctaccgcaaggccaagaagttcaccgccaagcgggagttcgagaagtccgacttcatccagcggcagctgaacgactcccgctacatcgccaagaagtccgtggagctgctgagccacatctgcaacgacgtgcgggtgatgcccggccagctgaccgcggagctccggcacctgtgggggctgaacaacatcctgcagcccgtgcagaacctgggcgagcacaccttcgacgtggacggcgagaacagcatcgcccactacgtggtgaccaacgagactggcgaggtggtgagcatccaccgcaagcagaacatccggcccagcaccaactccaacgagatcctggtgaccgggaacgtgaacaagaagaagttcacctccaagtacttcaagatcgacatggagactcccgacctgcccgacggcaagtactgggtgaagctgaacatcggggacaacctgcacgtgatccccaagtacatcgacaagcccgagatcgacgagaagtccatcgtgttcaagggcaacgtcgagaagggctacttcaagaacgacacctacggccggatcaaggccgacatcggcgacgggagctactgggccaagttcgagatcctgaacgtgaagttcgagactcccgtcaaggacaaccagcccaagatcaagcggaaccaggtgatgctgttcggcaacgtgctgaacggccagttcaagtgcttcatctaccagtgcgaaaccaacctgcgggacgggaagtactggatcatcctggacctgaaccccgccagcgtggagttcatccggagcgtgaaccccaagcccgaggtccaggtgaacgagctcctgatcacggccaccatcgacgaggacggcgtgctgaacgccgacatcgacaaggagtaccaggtgcagaccgactcccccaccgggaagtactacgtggtgatggacatcatcacccgggagcccaagctgtactccatcgagaacgagcccccgaagctggagaacggccagcagctgatcgagggcaacatctgggtggacaagtacaccggggagatcaagttcgaccccaagaagaaccgggacgaccaccggcaccacgccatcgacgccatcaccatcgccctgaccgagcagggctacctgcagcggctgagcacctacaacgcccagcggaaggagaagcagcggcagaagctggactccaccgagaagttccccgagccctggaacgggttcaccaacgacgtggcccgggccgccagcgccatcctgatctcccacaagaagaacaacaagaccctgaccaagaccaagaaggggttcggggtgcgcggccagctgcacgagcagaccctgtacggcaagaaggactactgcaagtccaaggagttcacctcccgggtgagcatcaagaagctgaagttcaaaaagaccaagggccaggccacgtacctggacgacatcatcgacgccgggatccagaacgccatctacaagaccatcaaggagaacctcaagaacgaggaggacaagcgcatcatcgaggacatcctgaagcgctaccacaacatcgggaacatcaagaccaagaaggcccaggagcaggaggccaaggagctgaacatcctgcggaccaagatcaactcccaggtggagaagatcctgcaggaggagaacttcttcctgaagaacgaggggaaccgctacaagaagctcaagaaggagagcatcgaggagcggcaccccgtgcccatcaagaaggtgaaggtgctgaaggtgctgggccacggcgggcacctgaaggagctgagctcctactccaagaagaagaaccgggtggtgaaggggaaccagtacgtgaaccccgggaacaaccaccacatcctgatctacctgaacagcgacggcaagctgtcccaggaggccatccagctgtgggccgtgatcgagcggaagtcccagggggacgagatctaccagctgcccgaggacggcgtgagcatcgtgaccaccctggagactaacgacatgttcatcctgggcctgagcaacgacgagttcgagtccaacatcaacaaccgggccttcctgtcccggtacctgtaccgggtgcagaacatctccgacatgtactacaacttccgcttccacctggccagcacgctggacaagaaggaggagtggatctacatccagtccctgtccgcctgggagaagctgaaccccatcaaggtgaagatcgacatcctgggcaacatcaagaaggtg

SEQ ID NO: 164 - DNA, 4548 bp, synthetic construct
  source 1..4548: mol_type = other DNA
atgtccaagatcctgggcctggacctggggaccaactccatcggctgggccgtggtggacagcgacctgcagaagatcctggacaccggcgtccggatcttccccgagggcgtgatcgacaagggcaagggcgagaaggagaagtccaagaactccagccgcaccgacaagcggcagatgcggcggcagttctaccgcaagcgcctgcggaagatcaagctgctgcaggtgctgatcgagcagcagatgtgccccctgaaggtggaggagctggccaagtggaagaactgggaccgcaccaagaaaaccgagggccggaagttccccagctccgaggagttcgacagctggatcaagctgaacccctacgagctgcgggagaaggccctcaacgagaagctgaccctctacgagctggggcgcatcttctaccacttcatccagcgccgcgggttcctgtccaaccgcaagggcaacaacgagtccaccatcttcaccaagggcaagcccgacgagaacatcctgcccatcaacgagacaaaggagaagatcgccaaccagagcctgggcaagtacctgaagtccatcagctacaacgacggggtgccctacaagaccatcaccgacgagagcgggaaggaggtgcgggtgcggggccggtacaccgtgcgggacatgtacatcgacgagttcgagaagatctggaaggtgcagtcccagttcctggagctgaacaagaaggaggtgaaggccacccggatccgggagctgaagggcgccctgaccgggaagcggaaccagaacaagatcgagtacatcaagaagaagttcggcgacaagaacgtggagatccggaccgccagccgggggatcaccaagctggtgaccgtggagcggctgtccctgaaggagttcctggccgggaagatcgaggaggtgcagaacgagaagggcgagaagaagctcgtgttcaagagcaacgagagcgtgctgttctggcagcgccccctgcgcagccagaagggcctgctggccaactgccgcttcgaggacaacctgcccgtgatcaaggagaacgggcggttcctgctgaagcagaacggggagatccagacccggtccaagaagccttgccccatctcgcaccccgagttcgagctgttccgcgcctaccagttcatcaacaacatctactacgggaagcacaacaagctgaccaccgagcagaaggagaaggtgctggacctgatcaacaagaacgacaagaacttcgacttcagcaagatccccgacgtgctgaagctgacctacgagaagttcaactacggcgacaagcagaaggtcgccgggaaccccaccatccgggccctgaagcccctgttcgagaaggaggtgtgggacaagtcctacgaggagatctggcactgcttctacttctacgaggacgacgacaagctcctcgagaagctgaagcgggacttcaacttcaagaaggacatcgccaccctgtgcaagatcaagctgaaggagggctacgccaacgtgagcctgaaggccatccggaacatcctgcccttcctgaagaagggctaccagttcgacaaggccgtgatcatcggcggcgtgaagaacgccttcgggcggcggtgggagtacttcaagaagttccacgacgacatcgagaaggagatcctgtccatcctgcgggaggacaacaaggagggggaggccatcgagaagatcaaggagcacctggcctcccccgtgttctcctacgggttcgccaagaacgacccccacttcctgcacctgtaccaccacagccaggaggtggagaagcaggaggacctgagctcccagctgcccgaggtggagaacctgcggaaccccatcgtgcagcaggggctgcacgagactcggcggctggtgaacttcctgatgaagaagtaccagaaggagttcggcaaggacttctacttcgaccagatcaaggtggagatggggcgggacctgcggaacaacaaggacggccggcaggagatgggcttccggatccgggagaacgaggccaagaacgaggaggcccgggagcggctggccgagtacggcctgcagccctcccggcagaacatccagaagtacctgatgttcaaggagatcgaggaccgggccggcaaggcccagtgcccctacaccggcaaggtgatctcgatctccaacctgctgggcaacaacaacgccatccagatcgagcacatcatccccttctcgatctccctggacgactccttcgggaacaagaccctgtgcgaggccaacttcaacagggagaagtccgaaaagacgccctaccagttctacaaggagaaccccgactccgacctgtggggcgtgtccagctgggaggccgtggaggagcgggccttccggctgctgccctacaggaaggccaagaagttcaccaccaagcaggagttcgagaagtcggacttcatccagcggcagctgaacgacagccgctacatcgccaagaagtccgtggagctgctgagccacgtgtgcaaggacgtgcgcgtgatgcccggccagctgaccgcggagctgcggcacctgtgggggctgaacaacatcctgcagcccgtgcagaacctggacaagcactcctacgacgtggacgacaagttcagcatcccccactacgtggtgaccaacaacaacggggacgtgatctccatccaccgcaagcagaacgagcggcccgaaacccgcgccaacgagatcctggccaccggctacgtggacaagcagaagttcacgagcaagtacttcaagatcgacatggagactcccgacctgcccaacgggaagtactgggccaagctgaacgtgtccaagagcatccgggtgatccccaagttcgtggaccggcccgagacagacgagaacagcatcgtgttcaagggcaagatcgagaagggcttcttcaagaacgacgcctacggccgggtgcggaccaagctggccgacggcgcctactgggccaagttccaggtcctgaacgccaagttcgagatccccgagaagaacaagcagcccaagaccaagcggaaccaggtgatgctgttcggcaacgtgctgaacggggagttcaagtgcttcatctaccagtgccagaccaacctgtgcgacgggaagtactggatcatcctggacctgaactccgacaacgtggagttcgtgcggtccgtgaacctgaagcccgagatcaagggcaacgagctgctgctcaccgccaccatcgacgaggagggggtgctgaaggccgacctggacaaggagttccaggtccagaccaccgaggccacgggcaagtactacgtgaccctggagatcatgacccacgagcccgagctgtacgccatcgagaacgtgctgcccaagctgggcaaggggcagcagctgatcgagggcaacatctgggtggacaagtacaccggggagatcaagttcgaccccaagaagaaccgggaggaccaccggcaccacgccatcgacgccatcaccatcgccctcaccgagcagggctacctgcagcggctgagcacctacaacgcccagcggaaggagaagcagcgggagaagctggactccaccgagaagttccccgagccctggggcgacttccagaaggacgtgcgggaggccgccgccgagatcctgatctcccacaagaagaacaacaagaccctgaccaagaacaagaagggcttcggcgtgtggggccagctgcacaaggagtacgtgttcgggaagcggcaggcccccggccaggagaaggggttccaccgccggaccaagatcaccgagctgaagaacaacaagcacgtgggcaaggtggtggacgacgccatccggaacatcatcgagaagcacctgcaggacaacttcaacatcgagatcaacaaccccaaggggtacagcatccccgacaacgccttcttcaaggacggcgagtggcagatcttcctgcccaacaagaacggggagaaggtccccgtgaagaaggtgcggatcaaggagaagatcggccacgccgcccagctgaagtccgggctgaaccagttcgtgaacccccggaacaaccaccacgtgctgatctacaaggaccgggaggggaacctgaaggagcaggtggtgcagttctggaccgtggtggagcggaagctgcagggggaggagatctaccagctgcccttcgacggcgccgccatcgtgaccaccctggagatcaacgacatgttcctgctggggctgagcaacgacgagttcgagtccaacaagaacaacctggccttcctgagcagctacctctaccgcgtccagaagttcaccagcggcgactactacttcaggttccacctggcctccaccgtgaacaacgacgtggagcgcatctacatcaagaacttcctggagggcaagaccggctggaagaactacaaccccatcaaggtgaagatcaacgtgctggggcagatcgagaagatc

SEQ ID NO: 165 - DNA, 4035 bp, synthetic construct
  source 1..4035: mol_type = other DNA
atgggcaacatcctgggcctggacctggggaccaactccatcggctgggccatcatcaagaccagcagcaacctgaacttcgagctgctggacaagggcgtgcgcatcttccaggagggcgtgaagctggagtccggcaaggagctgtcccgggccggcgagcggaccgcctaccggtccgcccgccggatcaagttccggcggcggctccggaagatcgagactctcagcgtgctctcccagttcgggtactgccccgagctgagcgacgccgagctgcgggactggcggtacaagaagaactaccccaagaacgacgccttccggcagtggtggctcaccgacaacgagggggacctggcccagaagaagttccagaagaagaacccctactacttccggaacctggccgccacccagaagctggacatggacatcgagtccaaccggtttctgatcggccgggccttctaccacatctgccagcggcggggcttcctgtccaaccggctggacaagaacaaggagtccgagggcgacatgaagcaggccatcaacagcctgaccgacgagatggaggaccgcaccctcgggcagtacttctacgagaagtaccagaagggccagaagatccgcgggcactacaccgaccgcaagcggcactacctcgaggagttcgagacaatctgccgcgtgcagaacctgcccgaggacttcatcaaggtggtgcaccgcgccatcttctaccagcgccccctgaagtcccagaagggcctggtgaagaagtgcgtgttcgagaagaagaagtcctgctgcgccatctcccggcccgagttcgaggagtaccgcatgctgggcttcatcaacagcatcaagatccagatgcccgacgagaaggagatgcggtccctgaaccgcggggagcgcaagtccatcctgcccctgttcttccggaagtccaaggaccagttccgcttcgaggacatcgccaagaagctggcccccaagaaccagtacgccttctgcaagggcgacaagagcgggggcgactacctgttcaacttccccatgaacaccaccgtgagcggctgccccgtgagcagccgcttcgaggagctgctgggctccaacttcatgaagatcagcttcgcctacctgcgggaggacgggcggagctccaacttcgacatctacgacatctggcacgtgctggccaccttcgacagcaccgagcacctgcagcagttcgccgagcagaagctgcagctggacaagggcctggccgagaagttcagcaagatcaacttccggcagggctacgccagcctgagcctgaaggccatccgcaacatcctgcccctgctgcgggacggcatgatctacagccacgccgtgttcctgagcaacatgaagatcgtgctgggccccgccatctgggaggacaaggacaagcgcgagtccatccagaacaaggtggtggccatcatccagaagcagaaccagcagaagaagatcgccgggctgatcaacagcatcctgtccgagcccgacaacctgaagaagaaggagtccgaccagtggggctacctgctgtcggagatcaaggccagcatcggcaagaccagctacgccaagatgaacgaggccgagcgcggggccctggagaagtgggccctggagaagatgcggaagatgatcgtgagctcccagcccgtggccatcgacagcatcgatgaccagatcaagaactacctgcgggagacattcaacgtgtccgacaagagcctggacaagctgtaccaccccagcagcatcggggtgtaccctcccgccaccgagggggagaacggcaaccccctgctgccctccccgcggatcaacagcatccgcaaccccatggccatgcgggccctgcaccagctgcgggtggtgatcaacgagctgatccgggaggggaaggtgtgccaggacacccgggtgcacatcgagatggcccgggagctgaacgacgccaaccggcggaagggcctgcagctgtggcagaaggagaaggagaaaacccacctggagtactccgagaagatcaaggagcacttcaagggggccgggatcaaccgggagccctcccggaacgagatcatgaagtacgccctctgggaggaccaggggcggctgtgcatctacaccgacaaggccaacaacaacatcggcatcgaggacttcctcgacaacaacccccagtacgacatcgagcacaccttccccaagtccaggaccctggatgactccatggagaacaagaccctgtgcgaggtggacttcaaccgcaagatcaagcggaaccgcatccccgccgagctggacaaccacgaggacatcctcgagcgggtgaagccctggaaggagaagtacaaggccctggagtcccagatcgagaacctgcggaagaaggccaagaacaccgacgacatcgggatccgggactgggccacccagcagcggcacaagctgacgctggagcggaactactggaaggggaagtaccaccgcttcgccatgaagaagatcccccacggcttcaagaactcccagatcgtggacaccgggatcatcaccaagtacgcccgcctgtacctcaagacctacttcaagaacgtggacgccatcaagggcagcctggtgtccgagttccggaagatgtggcacatccagcccgaggacaagaagaaggagcggaccaaccacatccaccactgcatcgacgcggtgaccatcgcctgcatgacccggaacaaccgggaccggctggcccagtactacgcccgcctggagtccgcctccaacaccagcaagaccaagcccaacgtgcggtacccctggcccgacttcgtgaagtccatccactccatcgacaaggagacactgatctcccactacacccccaacgtgttcctgcgccagaccaagcgcaaggtgcgcgtgcgcaacaagatccagcgcgacaagaagggggaccccatgttccagcaggggtccggcccccgggggtccctgcacaagggcaccttcctgggggccgtggaggacatcaccctgaacaacaacgggctggtggagacaaagatccgctacgcctgccggaagcccctgatggacctgaaggacgtccagctgaagcacatcgtggacgaccgggtccggaagatcgtggagaaggcccggaagaaggagaaggagctgaacaaggagatcatcaagcagtccgggctggtcaagaccaccgacaactccgagaagaagcggatcgagcacgagctggccatcctgaagaagaagaaggagaacctgtacacgatgcccaacaagaacgggagccccatcccgatcaagaaggtgcggatctacacccgcatcaccaaccccatcggcatcaaggaccagcgcgaccagtccaagaaggcccacaagcggaagtactacgccgagaacgacgagtactacctgatggccttctacgaggggaagatcgccaagggcaaggtcgtgcgggacttcgagctgctgaacaacttcgacgccgcccggcggctcaagacgttcagccccaaggagatcagcgggcccgccagccccgccgtgcccgaggccaagtgctcgggcaagacggagatcgccctgaaggccatcctgaagaagggccagctggtgatcctgaagaagaaggacagcgaggacatcttccggctgcccccggaggagctggtgaagcggctgtacaagatcaccagcttcgagaaggacggccggatcaacttccggcaccaccagaccgccatgatgcacagctccaagggggacgacaaggaccagatgaccatcctgaagtacatgaagatcaacaacctggagcccagccagatcgacttcgacaaccccctgccctggctgcggctgtcccggaccaactgggagttcgccgtggagggggtcgacttcaagctgaccccgctcggccgcctggtgcaggccggcggc

SEQ ID NO: 166 - DNA, 4200 bp, synthetic construct
  source 1..4200: mol_type = other DNA
atgaagaagatcctggggctggacctgggcaccacctccatcgggtgggccctggtgaacgagtccgagatcgagaacgagtccagctccatcatcaagaccggcgtgcggatcatccccctgtccaccgacgagtccaacgacttcgagaaggggaaggccatcagcatcaacgccgaccgcaccaccaagcggggcacccggcggaacctgcagcggtacaagatccgccggaagcagctgctgaacgtgctgaaggagaacaagctgatcgacaacaagtccgtgctgaccgaaaccggccccaacagcacccacagcctgctgagcctgcgggccaaggccgtgaacgaggagatcagcctggagaacttcgcgcgggtgctgctggccatcaacaagaagcggggctacaagagcaaccgcaaggccaaggacgacaccgacggccaggccatcgacggcatccacatcgccatcgagctgtacgagaagaacctgacccccggccagttcgtgtacgagcggctgaagcaggacaagaaggccatccccgacttctaccggtccgacctgcagaacgagttcgacgccatctggaagaagcagagcgagagctaccccgacatcctgaccatcaagctgaaggagtccctgaagaacaagaacaaggggcagagctggaagatctgcgagaagcccttcaacatcgtgggcatcaagcagtccggcaccgtgcagcagaagaagctggagctgtacaagtggcggacccaggccctgaaggagaagatcgacctggagcacctggccatcgtgctccaggagatcaactcccagatcaacaacagctccggctacctgggggagatcagcgaccggtccaagcagctgtacctgaacaagatcaccgtggggcagtacctgtacgagcagatcaagaacaacccccacaccccgctgaagaaccaggtgttctaccggcaggactacctggacgagttcgagcggatctgggaaacccagagcaagaaccgcaaggacatcctgaccaacgagctgaaggagcagatccgggacatcatcatcttctaccagcggcggctgaagtcccagaaggggctgatcagcatctgcgagttcgagcgccgcgacatcgagatcgagatcgacggcaagcggaagaagaaaaccatcggcccccgggtgatccccaagagcagccccctgttccaggagttcaggatctggcagatcctgaacaacctgaagttcgagaacaccgagactcacacctcctaccccatcagcgagctggaccaggatgtgagcatccgggagcagatgttcgacatcctgaacaccaagggcaagctgagccccaaggaggtgctgaacatcgtgatcgaggaccccgagaagtgggagatcaagaacttcaaggagctggagggcaactccacgaaccagaagctgttcaaggcctacagccagatcgtggagtcctccggccacagcgtgaacaacaagaagctgaaggagagctacgccgacatcttcaagaccatcgggatcaaccccgacatcctggagttcgacaccgagctgaagggcaacctgttcgagaagcaggcctcctaccagctgtggcacctgatctacagctacgagggggacaacagcgagacaggcaacgacaagctgtacgagctgctgtacaacaagttcgggttcgacaaggactacgccaagctgctgatcaacatcagcttccaggacgactacgggaacctgagcaccaaggccatcaagaagatcctgccctacctgaaggccgggcacgagtacagccaggcctgtctgctggccggctacaaccacagccactccatcaccaaggaggacaacgagcggcggcccctggacgacatcctggagctgctgcccaagaacagcctgcggaaccccgtggtggagaagatcctgaaccagatgatcaacgtgatcaacgccatcatcgagcagtacgggaagcccgacgagatccgcatcgagctggcccgggagctgaagaagaacgccgaggagcgggccgagatgacccgccagatcaccaagaccaccgccgagcacaacgagatccgggagaagctgaaggagatctaccccttcaacaccggcatccggatcaccaagaacgacatcatcaagcacaagctgcgggaggagctggccaccaacgggtacaagaccatctacaccaacacctacgtgcccctggagaagctgttcaccaaggagttcgacatcgagcacatcatccccaagaccgtgctgttcgacgacagcttctccaacaagaccatcgccgtgcgggacttcaaccgcatcaagtccaacaagaccggcatcgacgccgtggccgagaagtacggcaacgacagcgacgagttcaagcggtacgtgaacaccgtggagaagctgtacgagaacaacaagatctccaaggccaagcacaagaagctgctgatgaccgccgacaagatccccgacgggttcatcgagcgggacctgcggaactcccagtacatcgccaagaaggcccaggagatcctgcggaagatcgccaagacggtgacccccaccaccgggatcatcaccgacaagctgcgggaggactggcagctgatcaacgtgctgcaggagctcaactgggagaagtacgccaagctggagctgaccgacttcgagttcaacaaggaggggaagaagatccccgtgatcaaggactggtccaagcggaacgaccaccgccaccacgccatggacgccatcaccgtggccttcaccaagcccagcctgatccagtacttcaactacctgagcgcccggaagaacgagaagcacaagaagcactccaacatctacgccatcgagcagaaggaaaccttcgtgaacgacaagaacaagcggctgatcaagccgcccatccccatcgaggagttccgggccgaggccaagaagcagctggagagcatcctggtgagcttcaaggccaagaacaaggtggtgacccggaacatcaacaagacccggaagaagtccggggagaacaagaagatcgagctgacccccagggggcagctgcacgacgagacaatctacggccgcagctgccactacaccaccatcgaggagaaggtgggcagcaagttcaccaaggactacatcaacaacgtggccatcaagtcccagaaggaggccctgctgaagcgcctcaacgagttcgacggggacgccaagctggccttcaccgggaagaacagccccagcaagaaccccatctacctggacgagcaccagagcgccaagctgcccgagaaggtgaagttcgtggtgctggaggagtcctacaccatccggaaggagatctcccccaacctgaagatcgacaaggtgatcgacaagaagatccggaagatcctgaacaagcggctgaagcagttcaacaacgacccccagaaggccttctccaacctggaggagaaccccatctggctgatcgagcccaccgagaagtccaagtgggagaaccccgacaagcccaagagccacgagctggggatccccatcaagcgggtgaccatcaccgggatctccaacgccgaggctctgcacaacaagaaggaccacttcggcaacaagatcgccgactccaacgggaaggtgatccccacggacttcgtgagcccgggcaacaaccaccacatcgccatctacaaggacgaggaggggaagctgtacgaggacgtgatcagcttctacgacgccgtgacccgggtgaaccagggctcccccatcgtgtggcacacccaccccgagcaccccgactgggagctgatgttcaccctgaagaagaacgagtacttcatcttccccgaccccgggaaggggttcaacccctccgagatcgacctgatgaacgaggagaactaccacttcatcagcccccacctgttccgggtgcagaagatcgggaagaaggactactggttccggcaccacctcgagacaaagatcgaggacaccaagaagctggccgggatcacctacaagcggatgcagtccctggagagcatcaagaacatcatcaaggtgcgcatcaaccacctggggcagatcgtgaagatcggggagtac

SEQ ID NO: 167 - DNA, 4200 bp, synthetic construct
  source 1..4200: mol_type = other DNA
atgtccagcgtgaagctcgggctggacatcggcaccaactccatcgggtgggccatcatgaagaaggaggacgggaagtacgacttcctgaagaaggtggacgagaacaacgaggagatccccaccaagggctcctacatcttccccaagggggtggacgcccaggagaagtccggggccgccatccgccgggggttccgctccgcccgccggcggaccgagcggatccgccggcggaaggccgccaccctgaaggtgctgagcgagaacgggctgtgccccgccctgtccaaggaggagctgtccgactggcggtacaagaagaagtacccctgcgacaacgacgagttcatccgctggcagcggaccgggaccaagggcggggaccgcaagagcgagaagaagaagcagccctactacctgcggtacctggccgccaccaaggactcgctgatgaacagcgaggagggctgctacaacctgggccgggccttctaccacctggcccagcgccggggctacctgagcgtggaggaggagcaggccgacgaggccatcgagctgttcaagcagagcctgtccacgctcatcaacgagcaggacaccgtgctggccttcggcgagcccttcgaggccatcgccgaccagtacaagtccgacgccaaggtgaagtccctggccgggaagatccggcggcagctgaagaagaagctgtccttcctggagatcaagcggttcgtggagctgcagctctccgccaaggagaacctgggcaaggtggcctccggcatcaacgagctgacccagaagatcgaggagtccgggcagcccaccctgggctgctacttcaacagcatctacgccaagcagcacgggaacggcaaggtggagcggatccgcggccggtacatcgaccgggagaagcactacctgaacgagttcaactacatctgcgacaagcagaacctggacgacgagctgcgggggaagctgtacgacgccatcttctaccagcggccgctgaagtcccagaaggacctggtggccaagtgcccgctggagcccaagcggaagcgcatcgccatctcccaccccctgtacgaggagtacaggaagtgggagagcatcaaccgcatcaagatcaagaccgccctggacgaccggctgcggcccctgaacgtgagcgagaaggagctgatcgccagcgacttcgacctggtgggggacgtgtccttcgagaagctggccgagaagctgtgcggcggcgaggacttccgctacatcaaggacaaggagaagctggaggccgaggtggagttcaacttccccatcaccaccaccttctccgggtgccccaccatcgcccacctgaagaaggtgctgggcaaggacaacaccgggaagtactggttctacaagctgcccctgctgaacaccggctacaaggacgagaaggacaagaagcagatcagcatcgaggacatctggcactgcctgttcgtggacagctacggggagaaaaccaagcagcaggcccgggaggacttcgccaagaagcacctggagtgggtggacgccgagaagttcgccaagatcaagctgcggaagggctacggcagcctgagcaaggccgccatcaagaagatcctcccgcacctgcgcgagggggagatctactcccacgccgtgttcatggccaacaccgagcaggtgctgggccggcagatctcccaggaggagcaggaggccatcatcctgtgcatccgggaggccatcgactcccacgactacgagaagatggtgaacgccatcgtgaaccggtacctggacaagtacaaggagaacggggactcctacggggagaactcgttctcccggcgcgtccacgaggacgccatcaagagcgagatcgaggagtggttctccatcgagaagctccacctgatgaccaccgccgagtacgacgggctgaagtccgactgcttctacaagttcgtgaagcaggtgaacaacaagcggcccaaggacgtggagtacttcaagaccgagactatcagctccaagatcaaggacgccctgcagaagaagttccccgaggacaccatccagatcgacttcctgtaccaccccagcgccatcgaggcctaccccaaggccgggaagaagctggggaaccccgagatctcctccatcaagaaccccgtgttcaacaaggccatgcaccagatcaagcggctggtgaacaagatgatcgaggaggggctggtggacaaggacaccatcgtgaacgtggagctggctcgggagatcaactccgcgtcctaccgccgcgccctggcccagtaccagcgggaccacaagaccatccgcgagtgggccaagcgcaagatcatcgagtgctacaaggagaaggagcgggacaacatcaccccctccgacacccagatcgccaagtacatcctgtacgccgagcagaacggccactgcctgtacaccggcgagacaatcacccccaggaagttcttcaccgaccagcgcttcgacatcgagcacaccatcccccggagcaagtggaacgacaactcgatggtgaacaagaccctggccaacgccgagttcaaccgggactacaagaaaaccaagctgcccgccaacatggagctgaccttccggaacgagaagatcagccgggagagcatcatccacaaccgcaacacctggctgaagtcctaccgcatctccgggaacgaggtgcagttcaaggagagcctgagcgacatcaaggaggaggtgcggaagttcaaggccgccgcccgggccgccgccaacgacgccatcgcccacgaggagctgatggtgaaggtgcactacgccaagttccggctggagtacctgagcaagaagtaccgcaccttcgagcgggaggaggtgcccgcctccttcaacaacgccaacctggtggacacccggctgatcaccaagtacgcccgggcctacctgaactcctacttcaagaaggtgaacgtgatcaacgggcagctgaccgacaccctgcgcaagacctggggcctgcagggggagtacgaggagaaggaccggtccaaccacatccaccactgcatcgacgccgtgaccgtggcctgcatcgagaaggggaccgccaaccggctgtccgaggccttccactgctacgagcaggggaaggtgcccaaggtgatcctgagcccgcccatgctgcacttcgacaaccgcatgaagaacctgaagcacgaggtgttcatctaccaccggcaggccgaccgcatcaagcccctgctggacgagctgaacaaggagaaccccaagaagctcaacctgcggggcgccctgaacaagcccaacccctacgggtgcatcaagaaggacgacgccctgctgtacgtgcagcggagcctggtgaaggacatcaccgacaaggacatctcctcgatcatcgacgacatgctgaaggagcggatccaggacctgatccgccgcaacggcaacgtgaagatcgacaagctgaccaaggacggcgtgctggtgctgcccgagtacacctacacctccgacaaggggaaggtgaaggtgatcaaggaggtggtgctgcggaagatccgcctgaaggcctacaagcagagccagtaccccctcaagacctaccgcaagatcgaccagagcgtgaccgagtacaagcggaacatctacgtgctgaaggagaaggagtccaactacgaggcccggatctacggggacctggtgccggacaaccccgacggccggatcaagttcagccggcgggagtacttcctgatcaacaccaaggacatcgtgaagaacgacatcatgatcaggccccagtaccccttcctgttcagcatccacaccggggaccccttcatcatcttcgaccggcaccccgacgagatcgcctggaccgacaagaaggacctgaacgcccggctgttcaagatcaagaagttcgacgacgacaagaacatcatcctgcagcggaacagccacagccactccaacaaggacgtgtacgccaaggaggacgagctggacaacaagctcgccttcctgctgaagaaggtgcccagctccttccgggccgtgcccaccaacatcgacatcctgggccggatcgacatcagctacagcaagaacttcatcgacgac

SEQ ID NO: 168 - DNA, 4623 bp, synthetic construct
  source 1..4623: mol_type = other DNA
atggccaagatcctgggcctggacctgggcaccaacagcatcggctgggccgtggtcgagaaggaggacggcaagttcgccctggtggacaagggcgtgcggatcttccagcgcggctacggcgacgagcaccaggacagctcccgggccgccgagcggaccctgcaccgcggcgcccggaagctgaactaccggcggaagggccggaagatcgagctgctgcggctgctgggcgccgagtaccaccccttcaccgaggaggagctgatcgcctggcacaagtccaagaagtaccccgtgcggcaggagctgatcgactggttcaagctgaacccctacgacctgcggaagaaggccatcgacggcggcaagctgtcccagaaggagctgggccggatcttctaccacctgacccagcgccggggcttcaagtccaacaagaaggacagcacctccgtcgatggcgagtccaacgggaacgagcggaacctgcccaaggacatcgtcctggaccgggagtaccgggccaagaacggggacatcagcctgagccagaagctgtacaacgacctgtccgaggggaagaaggtgcggaacagctccgagaagaacaacatctcccggatcaccctggaggacgacttcaaggggatctgcaagaaccagaacctgaacaacgacttcatcgaggacgtgcgccgcaccatcttcgacgcccggcccctgaagtcccagaagggcaacgtgggccggtgcgtgttcgagaaggggaagccccggtgccccatctccagcgtggagttcgaggagtaccgcatgtacagcttcatcaacaacatcaaggtgaagcgcaaggacgagcccaagaaggagttcaagtccctgtacgagcagacctacttcgagctcgacatcgagaaggacatcgtgcccaccttcttccggcagaaaaccagcttcaagttccaggacatccggaagaagttcgacaagcacgacaacgccgacctgtacgagttcaactacaaggacaacatcacggtgtccgggtgcccagtgtccgcccacctgaaggccatcttcgggaacgagtggaaaaccaagatcttcaagcggaacggcgtgaacagcaagggcaacgagatcgagtacaacatcttcgacatctggcacctgctgttcgaccactacatccaggacaagaaggacgagcccctgctgaagatcgccaaggagatcttcgagctggagcccgagcagtccaagaagctgctggaggctcccatcacccagggctacaccaacctgtccttcaaggccatcgccaagatcatcccgttcctgaagaagggcttcaggctggaccaggccatcatcttcgccaacatccccaccgtgctggggctggacaaggacgacgacctgcccgacgacatctacgaggacatcctcgacatcttcaacaactacggggacgagaagaagcggaacaccatcgtgaacgactgcatcagcaccttccgcaacgagtccaagaacgcccacagcaactaccagatcgatgacatcgacaagcagatcatcgagaagcaggccaagaagaagttcggggaaaagacctggaacgacctgtccgaggtggagcagatctccatcctggacgagctggggaacaacttcgagaaccagctgcggcagggcggggtgggcgggcagttcatcaagaccgagtccatcaagcagaaggtgaaggactacctggtgaacaacctggggatcgccacccagctgaccgacaaggtgtaccaccccagcgccatcgagctgtacgagaaggtggagtacaacgacaaggggctgcggctgctgggcagccccatcatcgactccatcaagaaccccctgttcatgcgcagcatgtgcgagctgcgcaaggtggtgaacgagctgctcaagaccaacatcatcgacaacgaaacccagatcatcgtggagctgggccgcgacgtgaacgactacaacatgcggaaggccatcgagcgctaccagcgggagcgcgagactgagaacgagttctacaagcacctgctggaggagttctacaaggagaagaacatcaagaaaaccccctccgtggaggagggccagcgggtgaagttctgggtggagcagctcgacgacgagcaggacagcgaggccttctacaccaagctggaggagcacaccgcccagtacaccaagaaggaggaccgcatcaagctcccccagtacgccatcgagaagtaccggctgtggcgggagcagaagggcatctgcccctacacccacaaccccatcggcatggccgacctgctgaacgggaacaagtacgacttcgagcacaccgtgcccctgtccaagtccttcgacaacagcctggccaacaagaccatcgccgagtcccacttcaaccggtacaagaaggggaacaaggcccccttcgagctggaggccgaggaccgcaagaaggtggcccagttcatcgagcggtgggagatcaaggtggaggagctggagaagcggatcgagaagcagaagggcaaggccaagaacatccaggacaaggagcggaagaaccagaacatccaggagcggcactacctgcggctccacctgaagtactggaaaaccaaggtgaacaacttcaagatcaaggagatcaccgacggcttcaagaaccgccagttcgccgacatcagcatcatcaacaagtacgccctgatgtacctgcgctcctgcttcgacaacgtgtccaacatctccagccgcttcatcgacgagtaccgcaccatcgtggggtacgagaagtcccggaactaccacacccaccacacgatcgacgccgtgttctgcgcctgcgccgtggacttcgcccggcgcaagcccgacgccctggccaagctggagcggtactacaagatcaacaaccagtacaagaaggccacctggttcgacaaggagggggatgaggcgaagatctccagcctgaaggagaagctggagaaggccaaggacgacctggtgccctggtcccagttccgggacgacctggagaacctgggcaacagcgtgctggtgtcccggcgcttccaggacaacctgaagaagcagaccaagaagaagatccggagccggggcaaggtggagcaccgcgccgccaacatcgacggcgacggcaacgtgctggagtggaagtacaagaccgacatccacggcaacaagatccccgtgaaggggaagatgtgcgacgagaaccccgacttcgtgctgcactgcttcaaggacggcaagaagaagcgcctggaggtgctgggggactaccccgagtactccgaggacaccatctacagccagggctacctgtacgtccggaacaagaacaaggacgtgtgctacgagaaggaggcccggtacacctggcacaacgaccgcagcgacgccaagaccaacggcctgcgccggcggttccacgaggccaccctgtacggggccctgaagaagcccgagctgaacgacgagggcaagttcaagttcgacgagaacaacaacatcatcctgcagaagaacaagaacggcgaggacatcgtgttcaacaacatccgcaagaagctggaggacgcccggaaggccaccaacagcatcgtggatgagactctgcggaagatcatcaccgacgacaaccggcggtccaagctgctgaagcccaaggacgaggagcgggccatcctgttcaccatccctcccaagaagatcatgaagcaggtgctggccgtgatcgaggagatcagcaagtgcaactcccaggaggaggtggtgctgctggacgacaagaagcggaagctgcggctgcagtaccgcagcgaggccaccaagatcggccgcgtgcggtgcttcaagtccatcaaccccatctccatcaaggagaacagccacaaggccatgaaggacggctccgagaaggagtccatggcccacaagcactacgccctgtccgtgaaggacatgacctacgccgccgccatctacgagttcgagaagatcgacaaggccaccggcgagctgaagaaggtggagcgccacctcgagatcgtgaccgactacgaggtggccgacttcctgcggggcgacaaggtgcagaacagccccttccccgccaacgtgaagttcaaggacgggaagcaggaggtgctggtgagcaaccccaagatcatccagtccggcaagtacgtgctgttctacaaggacgaggacgagaaggaggacttcatcaagtgcatcaaccacaacgacatcagcaccgagctggccaacaccttctccaagcggctgtaccgcatcgacgccatcgagactggcccgcccctgcggatcaacttctgcatccacaactccgccatgaagaagaagtccaccgacaagaacgagatcaccatccagaagtacatggatgagaacaagctgaaggacagccagctgaagctggacgacagcgtgccctggtaccgcatcaccaagaagaactggaacttcctggtggaggggatcgacttccggatctcccccatcgggaagatcgagcggatc

SEQ ID NO: 169 - DNA, 4038 bp, synthetic construct
  source 1..4038: mol_type = other DNA
atgtccatcgccgagaagaacaacagcgagtactacctcggcctggacatcggcaccgacagcgtgggctgggccgtgaccgacctggactacaacatccagaagttcaacggcaaggccatgtggggcatccgcctgttcgaggccggcaagacggccgccgagcggcgggtgttccgcaccacccggcgccgcatccagcggcgcaagcaccgcatcgagctgctgcaggagctgttcgacagcgagatctccaaggccgacaccaacttctacctgcggctgaaggagagcaagtactgggtggaggaccgcacgctggggcagaccaacatcctgttcaacgaccccgagtacaccgacaaggactactacaagcagtaccccaccatctaccacctgcggaaggagctgatgaccagcgacgagccgcacgacgtgcggctcgtctacctggccatccaccacctgatcaagaaccggggccacttcctgttcgagggggagggccggaaggacgtcagctccttcaaggtgatcttccgggagctgtgccagtccatgcacgacgagatggagatcgtgctggaggccgccgacctggacgaggtggaggcggtgctgaagaaccgggagtacgggatcaccgacaagaaaacccggctgaacaagctcctgaccatcgacgacgagcacaagaaggagcagaagtccatcatcgccctgctggccgggggcaagaccaaggtggacgccctgttcggggagaaaacctccgaggacagcgacgtgaaggacatcaccttcgccggggacaagttcgaggagagcttcgacgccctgagcatcatgctcggggacaagatgttctgcctcgagaagatgaaggccatctacgactggtccatcctggaggagatcctccagggcgaggactacctgtcctacgccaaggtggccacctacgagaagcacaagaacgacctggccaccctgaagaagatcatgaagaagtaccggtccgacgagtacgacgcctgcttcaaggaccccggcaagaaggacaactactgcgcctacgtggggatggccaagaagggcaagaagaagctggtgctggagaagaagtgctcccaggaggacctgtgcaagtacctgggcaaggtgttcaaggacgtgaagcagaacgaccccgacctgcagtacctgatggccgagatccagcggggcaccctgctgcccaagcaggtgaacaaggacaacggggtcatcccccaccagctccacctggaggagctgcggatgatcctggccaacgtgaagaagtacctggagttcctgaacgacaaggacgactccgggttcaccgtgagcgagaagatcgagaagatcttcgccttccggatcccctactacgtggggcccctgaacgcccaccacaagtccctgggccactgctggatcgtgcggaacaagggcatggagaaccagaaggtgctgccctggaacttcgacgagatcgtgaacctggaggccagcgccaccgccttcatccgcaagatgaccagcaagtgcacctacgtgatcggcgccgacgtggtgcccaagaactccctggtgtacagcgagtttatggtgctgaacgagctgaacaacgtgaaggtgaacggggagctgctgcccgtcgagctgaaggagaaggtgttcgaggaggtgttcaagcgggtgaagcgggtgaccgggaagcggctgcgcgacttcctgatcgccgagggggccttcaagaagggcgacgagctgtccgggttcgaccagaacttcaagggctccctcaccgcctacctggacttcaagcgcatcctgggggagaagaagatccccaaggaggccatcgaggagatgatccaggccatcgtgctgttcggcgacgaccgcaagctgctgaagcggcgggtggagaagcggtacggcgagctgctctccaaggaggagatcgccgccatctgcaagctgaagtacaccggctggggccggctgagccgggagttcctggaggagatctacgtggtgaaccacaagaccggggagatgatcaacatcatctccatgatgcacgggaccaacgccaacctgatgcagctgctgagcagcgagtaccggttcaccgaggccctggaggcctacaacgaggagcggcagaccgaccactccgacatcgcctacgggatcgtgaaggacctgtacgtgagccccgccgtgcggcggtccatctggcagtccctgaagatcgtgaaggagatcgccaagatcaagaaggccgcccccaagaaggtgttcgtggaggtggcccgggagaacgccgagaagaagcggaccgtgtcccggaagaacgcgctgatcgccctgtacaagaactgcaaggaggaggagcgcgactggatcgccgagctcgacgccaagaccgaccacgagctgcggcgggaccggctgtacctgtactacacccagatgggccggtgcatgtacaccggcaagcccatcgacctgaaccggctgttcgacaccaacgtgtacgacgtggaccacatcttcccccagtccaagatcaaggacgacagcctgtccaaccgggtgctggtggagcggaaggtgaacgccaagaagtccgacgtgtaccccctgcccgaggagatccggaacaagaaccggggcttctggacaatgctgcaccgcaaggagctgatctccaagcggaagtacgaccggctcacccgggtgacccccttcagcgactccgagctggccgacttcatcgcccgccagctggtggagacacgccagagcaccaaggccgtggcccaggtgctgaagaaggtgttccccgacaccgacgtggtgtacgtgaaggccgggaacgtgtcccggttcaggtacgacttcaagatgatcaaggtgcgggaggtgaacgactaccaccacgccaaggacgcctacctgaacatcgtggtgggcaacgtgtacgacaccaagttcaccaagagccccctgaacttcatccaggggaaggacgggaagaactactccctgaaccagatgttcaactacgacgtggagcggtccggcgtgatcgcctggaaggccggcgagaagggcaccatcaccaccgtgaagcggatgatgaagaagaacaacatccagttcacccgccacgccttcgaggtgaagggcgggctgttcgaccagaccatcatgaagaagggcaagggccaggtgcccatcaagagctccgacgtgcacctgagcgacatcagcaagtacggcggctacaacaaggccgccggcgcctacttcttcctggtggagcacaccgtgaagaagaagcgcatccgcaccctggagttcgccccggtgtacctggccaagaagctggagaaccggtccgccctgctggagtactgcaagaacgagctgaacctgctggagagcaggatcctgctgcccaaggtgaagatcaacacgatgttcgagatcgacggcttcaagatgcacatctccggccggaccggcaagcaggtcatcttcaagggcgccgagcagctgtgcatctccgagcagtacggcctggacatcaagaagatcaacaagtacatccagcggtgcaagctggcccgggagaacctgcccgtgaccgccttcgacggcatcagcacccacaacaacgacgtgctgtacagcgtgatgatgcagaagctgaaggacaccgtgtacggcatccacctgtccagccagctgaagaacctggagaagggcaaggaggtgttcgggaagctgtccctgaaggagcagtgcgaggtgctgatggaggccctgaacctgttcagctgcaacagcctgagcgccaacttcaagctgatcaacagcggggcctcctgcggcaccctgaagctgtccaacaacttcagcaaccgcaagtccttcatcctgtacaaccagtccatcaccgggctgttcgagcagaaggtggacctgctgcggctg

SEQ ID NO: 170 - DNA, 3381 bp, synthetic construct
  source 1..3381: mol_type = other DNA
atgaacaaccccaagttcatcctggggctggacatcggcatcagctccgtgggctgggccgtgatccgggacgacgggtccaactcccggatcgaggacttcggggtgcggatcttcgagtccggcgagaagaaccagggcaagaaccgcaagtcccaggagcgccggaagtaccggtccgtgcgccggctgaaccgccggcgcaagcaccggcgcgaccggctgctgaactacctgcacagcatcaacgtgctggccatcaccgacctggaggagttcatccgccgggccgggttcaacacctacgagctgcgggtgcgcggcctgacccacaagctgaccgccatcgagctggggtacgtgctgatcaacctgtccaaccaccggggctaccgggagttctacgacgaggacaactccaagcacagcgagaaggggatcatcaagaccgcctgctccaacctggacgagatctacaacacctcccagtaccgcaccatcggggagatgctgtacgaggacaaggccttcaaggacatcgagaaccccaccaacaagttccccgtggtgcggaaccaccggggcaactaccggttcctgatcaagcgggagtacatcgaggccgaggtggagcacgtgctgatcgcccagagcaagtactacccccagctcaccagccagtccatccaggacatcaagaacatcatcttctcccagcgggacttcgaggacggccccgggaacccctccgaccagagccggcggtacaaggggtacgtggacgccaacggggagtgccccagcatcggccagtgccccttctaccccgagcacaagcggggcttccggaacaccctggtgggggacatcttcagcctgatcaacatcctgagccagtactcctacctggacatctccaccggggagattggcatcagcgatgtggccgcccgggccctgatcgacaacgcgatcgagttcgggttcctgaccgtgggcgacatgcacagcatcctgaacatgcacgggttcaccgtgatcaccaaggagcgggccaccaagaccgtgaaggccttccagttcatccccaagatcaagacgatcctggagcagagcggcctgtactggccccggtggatcgccgagaagcagttcgacatcgagacaccctccggcctgcaccggctgggggagatcctgagcaagtaccacacccccaggcggaagcggaacgagctggagaacagcaagctggtgaacgacagcttcatcgccctgagcatgtccaagagcttcaacggcaccaccggggtcagctaccggtacatgatcgaggccatcgaggccttccggctgggggagctctacggggacttccaggcccgcaaggtgaagtccttcaacgagctgaacatccggaccgacaagcagatcgaggtgaagaagctgcccccgatcaccgaccgggacatcagcatcaaccccgtggtgttccgggccatcaacgaaacccggaaggtggtgaacgccatcatcgcccagtacgggaacatgtcctccatcaacgtggaggtggcctccgacctggggcggtcccacgagcagcgcctggagatcatcaagcgccagaaggccaacgagaaggcccggcagcagctgatcgccgagtaccaggagctgttcccgcaggagaagatcagcagcgacgccctgcagcggtaccggctgtacaagctgcagggcggcaagtgcatgtactccggggagacaatcgacctgccccggatcaacaccaagatgtacgaggtggaccacatcgtgccctacagcctgatcctggacaacaccatcaacaacaaggtgctggtgctgtcccgggagaaccagaacaaggggcagcaggtgcccctgcagtacatgcgcgacaagaagcagcgggactccttcgagaagcggatcgaggagatgctgaagaacgacaaggtgagccccaagaagtacaagtacctgtgcctgcgggacctgtccgacgaggagactctgaactcctggaagtcccggaacatcaacgacacccggcacatcacccggtacgtggtggggtacctgcagagcagcctgaacttccagagcaaggtgaagaacaacgtgcacggcatcaaggccctgatcgtgagccggttccggcggaagtggctgtccaacaccatctggggcgccgaggacaaggaccgcggcaacacccacctgcaccacagcgtggacgccgtgatcctggccaacctgacccccgcctacgtggaggtggccagcgactacctgaagctgagcgggatgatccggcggaacaacggcaagatgtccgccgagtgcgaggactacctcgcccgctgcatccggaagatgcagacccactacggcttcaagcccagctacaccgacggcctgctgcgggcccaggccaagcggggccagatccccaccctgatccggaacctgcggtccgagatcctggtgcggttcatcgacgaccccagcctggagagcgactaccgcaagggggtgatggacttctacggcgacaaccacttcgccgagcggctgcggatgcccatcgtgagctacaagctcgagaagtgctaccgcggccccgtgtccgccgacaaccccatctccgtgcgggagatcgacggggagctgtaccagatcaaccgcaagagcgccagcctggtgaagcggcaggacttcagcaaggggaagatcgtgtccgaggacgccgacctgatcaagaccctggacagcatcttcaccgggaagtccgacaagtacagcctgggggactacctgaacgacaacaacctgtccgagttcaagaccctgctggggcggcggatccacaagatctccgtgcgggagaagctgggccggcaggagcccgggatcaagaagatccagcccggcaaccagaccctgctggacatcgacaagtactactgcctggagctgtaccgggacaaggccaacaagctgttcgtgcgggggctgcggtacttcgacctggtgaagaagaacaagaagctgtacctgaacaccccctaccccgacaactacggggagcacctgatgtacctgtacaccaacgagtacatccacgtgttcaaccggcaggagcagctgaagttcgccgggaactaccgcagcatcaagaacatcaactcccgccggttcaaccagcactccaaccgccccttccagcaggacgtgaccgtgttcagcatcgcccagaccgacaccatcaagaagtacgacgtggacatcatgggccggatccggggcgagatcaagtgcggcgagcccttctccctggtgcccgggaagaag

SEQ ID NO: 171 - DNA, 5028 bp, synthetic construct
  source 1..5028: mol_type = other DNA
atggccaagatcctgggcctggacctgggcaccaactccatcggctgggccgtggtggagacactgaacaacaaggacttcggcctgctgaaggagggggtgcggatcttcagcgagggcaacaccgccaaggaccgcaccgccaagcgcggcatccgccggctgtacttccggcggcggctgcgcaagatcgagacactgcggatcctgtccgagtgcgggtactgccccaccatcagcaccgaggagctgaacaactggcggaagcacaagaagtaccccatcgagaacaaggacctgatcaactggctgcgcaccgacaacatcggcggcaagggcgacaagcagcagcagatcaagaacccctactactaccggttcaaggccgtgaaggagcccatctccaagtacaacgtgggccgggccatctaccacctggcccagcgccgcgggttcctgagcaacagcctgagccaggagtccgacgagctgatcgtgctggtgaccaacaagatcaaggagaagatcgaggaaaccgagaacaaggaggagatccagaaggagatcaaggagatcttcaacggcctggacgaggagttcgccaaggatctgaaggtcaagaagctgaccaaggagatccacaagctgaagggcgagaacttcatccaggacgtggagaagctgatcaacaagaaggagaacctgggcgtggtcaaggccgggatcgagcagctgtccaaggagatccagatctccggccacgagtacctgggggagtacctgtacttcctgtaccagtcccactccaacgtgatcaacaacaagcagagcgtggagttctacaacagcttcgtggagaagttcaagaacgagaacgacgccaagaccgagctgaccaacaagatccggacccggtacatcggccgcaaggtgcactacctgcgggagttcgagcagatctgcaaggtgcagaacctggagaagatcaagaccaagaacggcaagaccctgaaggaggagctcgagaacgccctgttctacgtgcgccccctgaagtcccagcggggcgccctggggaagtgcaagatgcagaaggacaagagccggtgccccctgtcccaccccacctacgaggagttccggatgtggcagttcatcaacaacatccgctaccgcaaccgcaagatcgagagctcccagttcgagcacctgagctacgacgacaagatgaagatcgtgcccctgttcttccgggccacgaacttcaagttcaacgaggtgatcgccaagatcgaccccagcctggagacatacgagttctcccaccagaagcagttcgaggagaagcccaaggacagcctgaccgtggagagctgccccaccatcgcccggctggtgtcgatcttccggcacaaggggaactgggaggacatcaaaaagaccacctttcggtactgcgccaacgaccgggacgggaaccccaaggtggactccaacaacaagcccgtggagtccaagatcgacatctacgaggtgtggcagatcctgtaccggtccaagctgacccggaacaacgagaactacctgcggcagttcggcaaggagaagctgaagctgaccgacgacaagaaggccagcgacttccagaacctggccaagcgcctgaaggagggctacgccatgctgagcctgaacgccatcaagaagatcctggactacatgctgccccagaacgagaaccggcccgggtacatctactcccacgccgtgttcttcgccaacatgaagtccatcgtggggaagtccatctggcaggagaacaaggacaagatcatcgccgacatcatccagaagctggacctgcagcagaaggccaacgacaagaacaccttcgtgaactccctgctgcgggacttcttcaaccagccagacgaggacaagcacttcccctacgacgactacaccctcgacaacagcgagaagaagctgatcgagatcaaggccatcgagtacgtgggctcctacacctggaaggagtcccccgaggggttcaagaaggagttcctcaacttcgccgagaacgagtaccagctgttcctgcggaacgtgaagatcaacgggaacaagagcgactacttcaagtccgtgacccggaaggacaaggtgatcaaggactacatcaaggcctcctacctggagaagctgtccatcgccgagctgcgggagacattcaacatcaagaacctgaagctgtccaaggaggagatcgtggaccggcagctggggcggctgtaccaccccagcgagatccacctgtaccccaagcccaaggtgatcttcgacgtgaagggcaacgagaagctgatcatgcccagcccctacctgcccgacatcaagaaccccgtggccaaccgcaccctgcacaagctgaaggggctgatcgagtacctggtggacaacaacatcatcgacgagcggaccaacatccacatcgaggtggccaaggagatcaacggggccaacatgcggaacgccatcacccagttccagcgggaccggcagcaggagaacgagaagtaccgccggctgctggaggagttcgagaagcccgtgaacatcgacaccaccgagaaggtggtgctgtggaaggaccagctggagaaccagaccgtgttctacgacagcctgaaggagttcatcaagctgaaggactccaagaagctggacaacacccagaagaaggagctggacgtgctgaagcgccggctctgggacgagcagaagggcatctgcatgtactccggcgagagcatcagcatgagccagctgttccaggacggggtggtggagatcgagcacaccttcccccggtccaggatccccgacaactccctggagaacaagaccatcgccctgcgggaggagaaccagaacaaggggagcaagatcccctacgagctgggccccgagaagcacgccaagatcaaggggcggctctacttctggaagaacaagatcgacgacctgcgggccgactaccagcggctggagaagctggtgcggcaggacctgttctccacccccgagaagcgggacgtggccatccagaagaagttccacaagcggatggagctggagtactggaccaacaagaacgggaccggcaagtacgaccggttcctggccaaggagatcagcaagaagttcaagaactcccagctgaacgacacccgcatcatcaccaagtacgccagcaagtacctggagacatacttcaccaagaagcccttcatctcccagggcgtgctggtggacaccttcaagcgggagtggggcgtgctgcgccaggacgagaagaagtcccgggccaagcacatccaccacaccgtggacgccatcgtgatcgcctgcatgacctaccggttccgggagatcatcctgaagcgctactacaagcgcaaggagcggggcgagaacgtgtccctggaggtgcccttcaaggacttcgccaaccgcctccgcaacgagatcgaggaggaggtgctggtggagaacaccttcaaggacaagaccatcaagcagtccctgaagaaggtgcgccaccggggcaagatcgcccacaaggagaagtacaagaaggacgccgacggcaacttcatcaaggacaagcggaaccgcaagatcgtgaccaagcggtactaccgcctgaagaagggccgccagctgccctccaaccagatcgaggggctgaaggagggcgaggactacttcgccgaggtgaagaagaacggcaagacctgctactacgagttcgtgtacgacaagaacggccagaagatccaggagctggtgcccatctacagcaagggcaacaccatccgcgagcggatccacgaggactccttctacggggccatcaagcagttcgacatcgaggacggcaagctgcagaagggggaggacgggaagatcaagctgaagcaggacaaggacgagaaggacaagatcttctacgtcatccgcaagcccctgatctacgactcctccggcaacaagggcttcaagaacatcgaccagctcaagaccaccaacatcgtggaccccgtggtccacgagatgctgctgctgcaggccaacgaggccgagaacttctccaagagcttcgatgacggctactacatgctgaagcccaagcgcatcgacaacaagatcgagaaggacgagaacaacaacatcgtgttcgagcgcgacaacgaggacaagtacaagaaggggccctgcatcaagagcgtgcggatcttcagcaagctgaccgaccccatcaagctgaagcggcaggtgttcgagtccaagatccagcacaagtacaaggagatgtactacgtgaacaacaagaacaactacctgtacgtggtgtacgagaacagcatgaagaagggcgagctgaaggccgtggtgttcagcctgttcgactccgtgaagggggagcgggagtccctggagctggagtcccgcccctaccccgacagcatcgaggtgctgatcgggaagaacaggatcaactacgagctgctgacccggaacaaccgggacgtggtcctgaagaagaacctgcacgtgctgttcaagatcgacaaggaggagacaatcgaggacatcctcgagctgtccaccaaggagacacacaaccggctgtaccgcatggagggcctgcggaaggacctggtgtacgacgaggagaacaagtgctacagccggcccgggaccaccgggcagatcgagctgcggcaccacatgaccggcaacaagttcaacaacaactccgagatcgagggcctgcaggacatctaccggcggtacttcggcaacaacaagaagatgccggactccgtgaccgagttcaaggtcgagtaccccttccccttcctgctgatgagcctgaacaagatggacgtgttcatcgagtccatcgacttcgagctcaccccgctgggggagatccggctcgtgaacgagccggccaagccc

SEQ ID NO: 172 - DNA, 4131 bp, synthetic construct
  source 1..4131: mol_type = other DNA
atggagaagatcctggggatcgacctggggaccaactccatcggcctgaccctgcgcgaggacaacgagttcaagtggtacggggtctacaccttcaagaagggggtgggcgaggggaaggccggggagttctcctacgccgccgagcggaccaagcaccggtccacccggcggctgtacaacgcccggcggtaccgcaagtgggagacactgaaggtgctgatcgagaacgacttctgccccctgcggaagggcaacctcgacaagtggaagcactacgccaagggcatcgggcggtccttccccatcgacgacgagctgttccagcagtggatcaagctcgacttcaatggggacgacaagcccgacttcaccagcccctgccagctgcggcggatcctgatcgtggagaagctggacctgagcatcgcccagaaccggtacatgatcgggcgggccctgttccacatcgcccagcggcgggggttcaagagctcccggaagaacgggcagaacgagaaaaccgccgtgttcaaggggagcaccgagacaaagaccatcggccggaacgagtacgagaacctgatcatcgagaacggctccctgggcgccgccttcgccgccctggaggacaagaacatccggatccggaaccgctacaccctgcggtccgactaccagtacgaggtgaagaagatcctgaactaccagaacatcgagaacaaggacttctgcgagaacatcgagaaggccatcttcttccagcggcccctgcggtcccagaagggcctgatcgggaagtgcaccctggagcccaacaagtcccggtgccccgtgagccaccccaagttcgaggagtaccgggcctggagcttcatcaacaacatcaagttcctgaacaaggagacaaacctcttcgagcccatccccctcgccctgaagcagaagatctacaacgacaagttcttctacaagagcaagcgggagttccccttcaaggagatccgcaagatcatctccatcaacggcgggaaggagtgggagctgaactactcctccaagatggacgacgtgtccgtccccagctgcttcgtgagcgcccggctgaagtccgtgttcggggagaactgggagaactaccacaagcaggtgacccgggccaacaagaacgggatcaaggagacaaagatctacaccatcgaggacatctggcacatcctgttcgagttcgaggacgaggagtacttcaaggagttcctgtccaaggtgctggacctgaacgacagccagatcgacgagctgtgcaccctgttcaactccttccccgtgggctacgccaacctgagcctgaaggccatcaagaacatcctgcccttcctgcgggacgggaacatctacagcgagtccgtgatcctcgccaagatccccgagatcatcgggaagaagatcttcgaggacaacaagaacgagctgctgagcgccatcaaggagaaggtggcccacatccggaacaagaagaacaacgtgagcatcgtcaacaacctgatcttcaagtactacgccctggactacgaccagcggttcggctggaaggacttcgagtacaagctgagcgactccgacctgaacgacgtgaagtccaccatcatcgagttcttcgggcagaaaacctggaacaccaagaccgaggacgagaagcagaccatcatctccaaggtcagcaacctgtaccaggacttcttcgccagcgagaagcgcgagcacatcgcccagccccacctggtgaactccatcaaggagttcctgctggagtccttcgtgatcaacgagaagatcgtgaacaagatctaccacccctcccagatcgacatctaccccaagaaggaggggcagcagtacctgctgtcccccaagaccgccgccttcaagaaccccatggcgtacaagaccctgtaccgcctgaaggacgtgatcaactacctgatcgagaaggagatcatcgacaacgagacacggatcgtggtcgagatcgcccgggagctgaacgacagcaacaagcgctgggccatcgagaagtaccagcgcgaccgcgaggccgagaacatcgagtacgccaacgccatcagcgagctgctgaaggaccccgagttcagcggcatcgctgaccccaacagcaacagcgacaccgacaagttccggctgtggctggagcagaccgagaacctggaggacaccctcaaggagatccagaacatcaacaagaacaagtccctgaccgtgaaccagaaggacatcctgaagtaccggctgtggaaggagcagaactgcacctgcctgtacaccgggaagatcatcaacctgaccgacctgttcgacaccaacaaggtggacttcgagcacaccatccctcggtccaagtccttcgacaacagcctggccaacctgaccgtgtgctacgccgactacaaccgcaacgtgaagaacaacaagatgccctccgagctgcccaactacaacgaggagtggaacgggtactccgccatcaagccccggctggagagctgggagaagaaggtggacgacctgttcaagcagatcgacttctggaagttcaagagcaagatcgccatggacaagtccaccaaggacgacgccatccggcagaagcacctgcggcagatgcagtacgactactggaagaacaaggtggagcggttcaagcagaccgagatcacccagggcttcatcaacagccagctgtccgacacccagatcatcaccaagtacgcctaccactacctcaagaccgtgttcaacaaggtggacgtgatcaaggggtccaacaccgccgacttccggaagatctacgggatcaacagcaaggagatcgagaagaaccggggcgtgcacagccaccacgccatcgacgccgccgtgctgaccctgatcccctccgcccggaagcgggaggagatcctgaagaaggcctacctgtacgccgagaagaacttcggcaagcagtacctggagcagcccttcaaggggttcaactacgggatgatcatcgagatcgagaagaacatcctgatcaacaacatcgccgacaaggaccacaccctgacccccggccgcaagatcgtgcggaagcgggggcgggtggtgtggctggacaaggagaacaagaagcccaagaaggcccagggcgactccatccggggcgagctgcacctgcagtcctactacgggaagatcaagatcgccagcaaggacgagaacggccggctgatccgcgacaagaacaacgacatcgtgtacaaccagatcgacggcaaggacgagatctggatggtgatccggaagcccatcgacaacgtgaacttcgcctccgacatcgtggtggaccagcacctgtacaacttcctgaagaagcagctggagtccggcaccaagcaggtggacctggtggacttccagggccgcaagctgcggcacctgcggtgccgggtgaaggccgcccggggcttcatgaaccccgacaacgccaccgtggtgaaggagcaggtgtacaagtcccggaaggactacaagaactacatctacaccgactccggcgagaactacatgtacggcatgtacgagaacgagaacggccggaagatcatcgccatcaacaagttcgaggccagccggttcagcctgaaccagaacttcgacagccgggaggagatcttcaagatcaaggagccggtgatgatcggctccgggaagaagtccaaggaggcccggctgatccacgtgttcatccccgggcagaaggtgatcttcttcttcgagaacaaggaggagctgaaggagctgatgcccaacaagatcagctcccgcctgtactacatcaagcggttccaccaggccgagcgcggctccatcgtgttccagcaccacatcgaggcccggaacgacgaggagctgagcaaggtgttcggcgtgatcgggaagaacggcttctccgtggacaagctgaacaagaacttcagcccgccccgcatcctgtacacccccaacaaggacatcttcatcatcgaggggaaggacttcgacttctccctcgatgggagcatcaagttcaagtac

SEQ ID NO: 173 - DNA, 4587 bp, synthetic construct
  source 1..4587: mol_type = other DNA
atggccaagatcctcggcctggacctggggaccaactccatcggctgggccgtgatcgacgccaccaccgaggacggcaaggtgaagcggtacaacttcatcgccgacagcggggtgcgcatcttccccgagggggtggagcccaccaccatcgggcagggcgacaaggagcagtccaagaacgccagccggcgggagcaccggcagatgcgccggcaggtgtaccgcaagaagctgcggaaggtgaagctcctggaggccctgatcgagctgaagatgtgccccctgtccatcgagggcctgtaccagtggagcaagtggaacaagtccaagaaaaccgaggggaagctgttccccaccgagcccaagttcgtggcctggctgaagatgaacccctacaagctccgctccaaggccctgatcgagcccgtggagctgatggagctggggcgcatcttctaccacttcatccagcggcggggcttcctgtccagccgcaagggcaacgacgacggggccatcttcaagggcaaggagaacatgtccggcatcgactccacccgggagctgatgaacggcaagcccctgggcaaggtgctgttcgacatctcctacaaggagggcgagaagtacaaccagaagaagaacaacgacggcaacgagctgcgggtgcgggcccgctacacccagcgggacatgtacgtggaggagttccacaagatctggaagcagcaggccagccgcctcggcctggagcagaaaaccatcgagatccggaagtcccggttcctgaagggctccctgaccgcccggcggaaccggcacaagctggagaactacatcgagaagtacggcaaggagcacgtgctgatcaaggggaaccgggtgatcaccgaggagcaggtgcccctgaagcagttcttcgccggggagatcacggagcacgacaagcagctgcggttcaagtccaacgagagcctgctgttctggcagcggcccctgcgctcccagaagaacctgctggacaactgcaggttcgagaacaacctccccgtgctgatggagaacggggagttccgccgcaagggcaaggacatcgtgcggcggagcaagaagccctgccccctgtcccaccccgagttcgagctgttccggagctaccagttcatcaacaacatcaagtacgggaaggggcagttcctgaccgccgaccagcggcacctggtgctggagatcctgaactccaaggacgggaacttcaacttcgaggagatccccaaggccctgaacctcacctacgagaagttcaactacgacaacgaccagaagatccaggggaacaccaccatcaagaagctgaagtccctgttccccgaggagctctggatcgagtcctacgaggacatctggcactgcttctacttcttctacgacaccgagaagctgttcgagaagctgaagaaggacttccagctcaagaccaacgacatcgacaagatcagcaagatcaagctgaaggacggctacagcaacgtgagcctgaaggccatccggaacatcaacagcttcctggagaaggggtacagctactccgacgccgtgatcctgggcggcatcaagaacgccttcgggcagcggtgggagaacttctccgacttctacctggagatcgaggacacggtgcggaggatcctgaaggaggacaaccgggagggggaggccatggagaagatcaaggactacctggccgaccccatcaactccttcgggttcagcaacaacgcccccgcgttcacccagctgtaccaccactcccaggaggtggtggagaaggagaagcaggacttcctgcccgagctggagaacctgcggaaccccatcgtgcagcagaccctgcacgagatgcgccggctggtgaacgccctgctggtgaagtacaagaaggaggagcccgggttctccttcgagcggatccacgtggagatgggccgggacctgaagaacaccaagaccaagcggcgcgagctcacccagaagatccgggagaacgagaagaagaacgacgaggcccggaagcggctggaggagttcgggctgcggcccacccgcgacaacctgctgcggtacctgctgtacgacgagatccagaagcacatcagcgggcccgtgctgtgcccctacaccggcaaggtgatctccatgtccgacctgttctccgggggcaacgtggtgcagatcgagcacatcatcccctacagcgtgtccctggacgacagcttcaacaacaagaccatctgcgaggccaacttcaaccgcatgaagggggaaaagaccccctacgagttcttcctggtgaaccccgactacaagctgtgggggatcaacaagtacgagacaaccgaggacgcctggaaggagatctccgagcgggcgttcaacctgctgccctacggcaaggccaagcgcttcacctccaagaagaagttcgagaagtccgacttcatcgagcggcagctgaacgacacccggtacatcagcaagaaggccgtggagctgctgtcctccgtgtgcgacaacgtgcgcatgctgcccggccaggtgaccagcgagctgcggcacctgtggggcatcaacaacatcctgaaccccgtgctgggcatcgagaacttcgatgccgacgtgcaggagtacaagcggatcccctactacgtggtgaccgacgagaacaacaacgtgctgaacatccaccccaagaccaacgaccggccccacgtggagagcgagaacctggtgctcgccgggcgggtgaacaagggcaccttcagcaccaagtacatgcagctgaaggtggacacccccaacctgaaggacggggactactgggccgtggtgaacatctccgagccccacagcttccagaaggtgttcagcgagcggcccagcgacgacgagaaccacatcgtgttcaagggccgcatcgagaagcagttcttcaacaacgacaccatccggaagaagatcaagaccgacgagacagaggacggcacctactgggccaagttctccatcgtgaacaaggagctgaagctggccgagggcaagggcaagctgaagatcgccggcagcaagatcgccctcttcggggaggtgaagaacggccgcttcacctgccacatctaccagtgcgagacaaacatgcccgacggcaagtactgggtcctgctggagctggacttcgacaccatcgacttcatccgggccgtgaacaccaagcccgagatcaacgagcaccagatcctgtcctacgccaccgtggacgagaagggcttcctgaccgccgacaccgaccccggctacaagaagaaggtgaccatctccgccgggcggtactactgcatcttcgacatcaagaccatcgacgagcagctgtaccccatggagaacgaggcccccgccctgagcaagggcacccggatcaaggaggccatcgtctgggtggacgaggccaccggggagatcaagtacgaccccaagaagaaccgggacgaccaccggcaccacgccatcgacgccatcacggtggccctgaccgagcagggctacctgcagcggctgtccacctaccacgccaaggaggagaacgccaagcggggcatcgacaacaccgagaagttccccgagccctgggacggcttctccaacgacgtgaagaaggtggcggccagcctgctgatctcccacaagcagaacaacaaggtgctcaccaagatctccaagaagatccagaagaacggcgaggtgaagaagtccatcggcttcgccgcccggggccagctgcacaaggagacagtgttcggcaagcggcggagccccgggcacagcgagcactcctaccacatccggaaggacatccggggcctgaaggacaagaagcagatcaacaaggtggtggacgacaccatccgggagcggatcttcaaccacctgcgggagaactacggcatcgacaccagcaaggacaacttcagcgtgcccaaggacgccttctacaaggacggggagtactccctgttcctgcccaacaaccggggcggggacagggtccccatcaagaaggtgcgcatgcgggagaacatcgggaacgccatccagctgaagaacaacatcaagcagttcgtgaacccccggaacaaccaccacgtgctgatctacgaggacttcgacggcaacctgcgggagaaggtggagtccttcatcgaggtggtggagcgcaagcggaacggcgacctggtgtaccagctgcccaaggaggacggccggaagatcatcgccaccctggagatcaacgacatgttcctcctgggcctgggcaaggacatcgagatcgacaccgcctccaccgacctcctgtccaagcacctgtaccgggtgcagaaggtgtcctccagctactacaccttccggcaccacctggccagcaccctggacaacaagaacgaggagatctacatccagtccttcggcgcctgggagaagtacaaccccatcaaggtgaagatcgacatcctgggcaacatcaagcggatc

SEQ ID NO: 174 - DNA, 4434 bp, synthetic construct
  source 1..4434: mol_type = other DNA
atggccaagatcctggggctggacctgggcaccaacagcatcggctgggccgtggtggagctgatcgacggctccttccggctgatcgccaagggcgtgcacatcttccagcgcggctacggcgacgagcaccaggacgtgtcccgggccagcgagcgcacccgggtgcgcagcgcccggaagctgatctaccggcggaagggccggaagatcgacctgctgcgcctgctgggcagcgagtaccaccccttcatcgacgacgagctgacggagtggcacaagaaccgcaagtaccccatccggaccgagatccaggagtggttcaagctgaacccctacgagctgcggaacaacgccatcgaggggcgcaagctgagccgccaggagctcggccggatcttctaccactacacccagcggcgcggcttcaagtccaacaagaaggacatcagctcctactccaacgacgagaagggggtgaagaagaacctgcccaaggacgtgcagtaccacgaggagtacctctccgagttcggggagactcccaagtccaaggtgctgtacgagcggcacaagaacgccgagcggatccggaacacgtccgagaagaacaagatcagccggatcaccctgcaggaggacttcctgcagatctgcaagaagcaggtgctgctggacgagttcaccgaggacgtgcggaagatcatcttcgacgcccggcccctgaagtcccagaagggcaacgtgggcaagtgcgtgttcgagaagaacaagccccgctgccccatctccagcgtggagttcgaggagtaccgcatgtactccttcatcaacaacatcaagatcaagcggaagaacgaggacaagaaggagttccgcagcctgtacgagcagaacgacatcgacaacgccgtggagctcatcatccccctgttctaccgccagaagcccagcttcaagttcgaggacatccaccgcaagctggacaaggccgggctgtacgacttcaactacaaggacatcatgaccgtgtccgggtgccccctgagcgcccacctgaagtccgtgttcggggacaactggaagtccatccgcttcgacaacggcaagaacaagaacggggaggacaagtacatcgagctgaaggacatctggcacatgctgttcgaccactacatgcaggacaaggacgacgagcccctgatccagatcgcccagaccaagctggagctgtccaaggaggagagcgagaagttcatcaaggcccccgtgaagcaggggtacagcaacctgtcctacaaggccatcgagcgcatcctgttcttcctgaagcaggggtaccagaccgacaaggccatcatcctggccaagctgcccgacatcctggccaagcacaacaagcgggactgcatcaaccagatcatcgaggaggtggagaagatcttcgagatctacagccgccgcaagaagcggaacgagatcgtgaacgcctgcatctccgtgttccgctccgacttcaagaacgcccacagcaactacaagctggacgagttcgacaaggagatcgtggtgcagaagatcatcagcatctacgggaacaccacctggagcaactactccctggacgagcagaccgccatcatccgggatgtcgagaacgccttcgagaaccagctgcggagcggcaacatcgggggcacctacaagaagtccatgtccatcaagcagcacgtggagtccttcctgatcgaggagatcgggatcgacaagaacaccgcggccaagctgtaccaccccagcgccatcgacttctaccccatcgtcgagcccgacgtgaacgggaagcggctgctgggcagccccctgaaggactccatcaagaaccccctgttcatgcggagcatgtgcgagctccgcaaggtggtcaacgagctgatcaacaccgacttctacgacgaccgcctgcagtgcatggagcccctgatcgacagcgagacactgatcgtgatcgagacagggcgcgacgtgaacgactacaacatgcggaaggccatcgaccgctaccagaacgagcgggagactgagaacgagttctacgagagcatcctgatcgagttcttcaaggagacaaacaagaaccgcatccccagcgaggacgacaagcggaagctgaagttctgggtggagcagcacgagtccgtggaggagtccgaggacttctacaacaagctggagagccacacctaccagtacaccaagtccgccgacaggatcaagctgcccaaggacgccatcgagaagtaccggctgtggaaggagcagaacgggatctgcatctacaccaagaaccagatctccatctccgacctgttcgacgacaacaagatcgacttcgagcacaccatccccctgagcaagagcttcgacaacagcctggagaacaagaccatctccgaggcctacttcaaccggtacatcaagaagaacaagatcccctacgagctggacaaggagtacatcaacaacgtgtccggcttcatcatccgctgggagaagaagatcgaggagatcgaggagcgcatcgagaacctgaagcgcaaggccaagaacctgcaggacaaggagtccaagaacgagaacatccagcagcggcactacctgcggatgcacctgaagtactggcagaagaaggtgaacaacttcaaggccaaggaggtgaccgacggcttccggaaccggcagctggtggacatcggcatcatcaacaagtacgcccggctgtacctgaagtccaccttcgacaacgtgttctccgtgaacgccagcttcgtggacgactaccgcgccctgatcggctacaagaagaaccgcaacaaccacatccaccacacggtggacgccatcttctgcgcctgcagcgtggagttcgtccgccggaagccccacgccctccggaccctggagaagtactactacctgaaggacgagctgcagaaggccatcctgttcgaggagcagcccaacgagcagaccaagcgcctgaaggaggagctggagatcgtgcacgagaacctggagccctggaagggcttcgccaagcagctcgacgagctgaaggaggagatcctggtgagccaccgctaccgggacaagctgaagaagcagaccaagaagaagatccggatccggggcaagatcgtgcaccgggccgagaagatccagaagctggacgacaacaagatcaaggtggtggagtggaagtacaagaccgacatctacgggaagaagatccccgtgaagggccgcctgaacgacgagaaccccgacttcgtgctgcaccggttccgggacgactccaagatcctcatcgaggtgctgaagtccttcgaggagtgcaaggagaacgagaacaccctggtgctgaaggggtacaagtacgtgcggaacaaggccggggagatcgtgtacgagaaggagccccggtacacctggcacaacgaccgggagggctccctgaccaccggggtgcgggactccctgcacaaggagatgctgtacggccgcgtgaagcggcccgccaagaccgagaacggggagttcgtgaaggactccatcaacggcgtgctgatggaggactggtacgtgaagcggatccccgtggagtccctggacgccaacgacatcaagaacatcgtggacgacggcatcaaggcccgcatccagaagcacggcttcaagaacgtgaagaacaacggggagatcatcctccccgccgaggagaacctgaaggagatgaccatcaagcggctgcggtgccggcagaagaagggccggggcttcctgaacgccatccccctgaaggagaacagccacctgtccgccaagcacgagagccgggtggagcggttcggcaaggactacaagcagatgtcctacgtcgacaacgacgggaactaccagctgggcatctacagcgacggccggaacacccggtacaagttcctgaacaacctggacgccagcgagctgctggtgtccaacgggaaggtggtcaaggtgcaggacaacgagttcttctccgtgcggggcaagaagatcttcctggagctgaagcaggtgctgcaccagaacctgtacgccatcctgctgcagagcaaggagagcatcaacgacgtgaactgggacagccccaacgagctgatgcggcggctgtacgagatcaagtcgttcagcgagagcgacggccgggccaacatcttctgcctgcacaaccagtgcgccgacaacgtgtccaagctggacctgaagatcggggagttcaagctgggcatccccgtggtgaagtacatccgcttccgccacaccaacttcaacgccctgatcgagggcgtggacttcaagctgaccccgctgggggagatcaagcggctgaag

SEQ ID NO: 175 - DNA, 3222 bp, synthetic construct
  source 1..3222: mol_type = other DNA
atgtcctacatcctgggcctggacctgggggagacatccgtgggctgggccgtgctggaggagcgcggcaacaagcccgtggccctgaaggacgccggggtgcgggtgttccccaagggggccgaggtggacgagaagcgggggatcagcacctccgagtctcagacccggcggcagaagcggtcccagcgccggatcatccggcgccggagcgaccgcaagaaggccctgaagaacctgctgctgagccacgccctgctgcccagcgacaacgagaagcaggagtccctgctgcaggccgacccctacgagatccggacccggggcctggacaccaagctgcggcccgacgagatcggccgcgccctggtgcacatcaaccagcggcgcggcttcaagtccaaccgcaagagcggggacctgaaggaggagggcatcctggccacctccatcgggaccctggccaaggccatggaggagtcccaggcccgcagcttcggggagtacctgtaccggctggacagcgggtacgacaagggcgccggcaaggagaacacccgcgagcggcagggcgtggccctgcggaaccgcgggggcgggtacgagcacctgcccagccgggccatgatcgaggacgagttcaacctgctgtggtccgcccaggccgcccaccaccccggcctgctgaccaaggacctgaagcgggccgtggagggcatcatcttctaccagcggtcctacgccatcagcgaggaccgccgggccagctggggcaagaagttcgtgaacgccaagatggcgccccagctgaagcactgccccctcttccccgaggagtaccgcagccccgccgggacctgggaggcccagcggttccggctgctgaaggaggtgaacaacctggaggtgctggacgagtacggcaagggccggaagctggacaccgccgagcgcaagacgctggtggacgccctcggcatcgaggagaagcagaccttcgtccagctgtccaagctgatcgccctgcccaaggagcaccgcttcaacctggaggccggggagcggaagcacctggacggcaacaagttcgaggtgcagctgatcaagggctactacggcaagaaaaccaagaaggagaaggaggcctggctggccctggacggcgacttcaagggccacctgcgggagctggtggccaacgtggaggacgccgaccagttcaccgagacagccaaggagctgggcctgaccgagaagcagatcgaggggctgcggaccgtgcagcccaccgggaactacctggcctacagctacaaggccatccagaacctgctgcagttcctggaggacggcctggacgagtaccacgccatccagaaggcccgggagcagggcgtgatcccgccctccaacgagcccgacgagtacgacctgctccccctgccgccggacctgcccaaccccatcgtgacccgggccctgcacgagactcggaaggtggtgaacctgctgatcaagacctacggcaagcccagccgcatcgtggtggagctggcccgggaggtgaagcacggccccaagcgccggcagagcatctcccggaccatcgaggagaaccgcaagcggaacgagaaggtgaaggcctggtaccgcgagcacggggtgctgacccccacccgggacgacgtgatcaagtacaagctgtgggaggaccagaaccacctgtgcgtgtacaccggcaagaccatcgaccaggaggacctgctgagcgaccagaacgtggtcgacatcgaccacatcctgccccgcagcaggtccttcgacgacagctaccgcaacaaggtgctgtgcgtcacccaggccaaccgggagaagggccagcgcctgcccgtggagtggctgggcgggcccgggaacgagcggttcgacaagatgctggtgcggctgaagaacatgcccagcatcgggcacgacaagttcgcccgcttcaaccaggagaagatcgacaccgagcacgccatcgcccggcagctggtggacacccagtacatcagccgcgaggcggtggcctacctgaaccagctgttccccaaggagctgcgggtgggggagaaggccgtgggcaccgtgatcggcaagctgacctccgacctgcggcacgtgtggggcctgaacaccatcctgagcgggcaggaggacctgaagaaccgggaggaccaccgccaccacgccctggacgccatcgtggtggcctgcgccacccggaagcacgtccaggagctggccaagcggtccaagtgggggcaggacccctccgaggtgcccccgccctggaagcgcttccgggacgacgtgaagcatatggtggactcccggaagcgcacctggaagctgggggaccaggagatcaccacggaggggatgctggtgtcccaccgggccgagaagaagatcctgggcggcttccaccaggagacaaactacggccccacgcgggaccccgagtggttcgtgcggcgggtcggggtccgctccctgaccgggcccatgatcaagggcatccgggacgacgccatccggcggatcctgaccaagcactgcgaggagaacgggtacaaccccgagcaggacggccggaccatcccgcccaaggtgttccagaccctgcccacgatgccctccggcgtgcccatccgcagcgtgcggatcgtggagcgcaagcagaagggcatcgaggtgttcggcgggaagaacggcatcgccccgcgggccgtcctgctggggaacaaccaccacctggagatggtggagcgggacaacaacggggtgaaggagatgctggtgtgcatcgtccccaccctggaggccgcccgccgctcccgcatccgcaaggagcccatcgtgcagcgggaccacggggagggcatgaccttcaagctctccctggcccgcaaggaggccgtggtgttccacaagaacgggaagcaccacctgtgctacatcaccatcatctccggctcctccaccctgagcaagggctccgggtccatggacctgaccttccggacccacaacgacgcccggatgcccaagaaggacaccaagggcaaggccctgaagatcacccccttcgcccgcatccagtccttcggggcctggcacgagctggagcccatcaaggtggccgtggaccccatcggccgcctgtccaaggccaacgac

SEQ ID NO: 176 - DNA, 4065 bp, synthetic construct
  source 1..4065: mol_type = other DNA
atgtccaagatcctgggcctggacctgggcaccaactccatcggctgggccgtggtggagacagagaacaacaagaccttctccctgaagaacaagggggtgcggatcttccaggagggcgtgaagatcgagaagggcgtggagggctccaaggccgccgagcggaccggctaccggtccgctcggcggctgaagttccggcgcaagctccggaagatcgaggtcctgaaggccctgatcaagtacgacctgtgcccgcccatcagcggcgacgagctgaacatctggcggtacaagaagatctaccccaccaacaaggagttccgcaactggtggctgaccgacaacaacgacaaccgggccgaccgcaagaagcagaccaagaacccctactactaccggtccaaggtggccaccgaccagctggacctgaccaagcaggaggaccggtacatcctgggccgggccttctaccacatggcccagcggcgggggttcctgtccaaccgcctggagaacaccaaggagtccgacggggccgtgacccagaacatcaagcagatcaaccagcagaagggggacctgaccctgggccagtacttctaccagtgctactgcaagggcgagaagatccggaaccagtacaccgaccgcctggagcactacgagcaggagttcaaccacatctgcaagctgcagggggtcagcgacgagcagaagaacaccctgcacaaggccatcttctaccagcggcccctgaagtcccagaaggggctgatcggcaagtgccccttcgagcccaagaagtcccgggtggccatcagccacccggccttcgaggagtaccgcatgctgtgcttcgtgaacagcatcaagatcaagctgcccgaggacgacaagctgcggttcctgaccgagaaggagcgggagaagatcatccccgtgttctaccgcaagagcaagccccacttcgacttcgaggacatcgccaagcagctggcccccgccaagcagtacaagttctacaaggccaaggacaagaaccccgaggactacctgttcaacttcaacatgaaaaccaccgtgagcgggtgcccagtgtccgcccggctgaagtccatcttcggcgacgagtggaaggagctgcagatcaagcacgagcggaaggaccactccaagtccatcatcgacatctacgacgtgtggcacgtgctgatgacctacgacagcgaggacaagctgttcgagttcgccaagtgcaagctgggcctgggggaggacaagacgaaggagttcgtccagttcaacctcccccagggctacggctccctgagcctgaaggccatcaacaagatcctgcccttcctgcagatgggcctgatctacagccacgccgtgttcctggccaacatggccaacgtgatcccgcccatcctctggaacgacccagagaacaagcagctgatcatcaacgagatcaaggagctgatccagagccagaacgaggagaagcagatcaccgacatcgtgaacggcctgatcaagatcaacaaggacagcaacgccgtgtggtccaacgaggccgagcgggccttcaagaacgacctgctgcagaacatcaaggcctactacggcagcaccaagttcgacagcttctccatcgcccagaagtccagcatcgagactaacgccttcgagctgctcaagacccagatgcagaagaagaacggcgtgggcgagttcgccaaggtgaagcgcatcgacgagcgcatcaaggacttcctgatcgacaacttcaacgacgacatcaagcccgagaacctgtaccaccccagcgccatcgaaaccttcaagcccgcccagaagaacaacgaggacaagtacctgctggggagccccatcaccagcagcgtgcggaaccccatggccatgcgggccctgcaccagctgcggaagctgatcaaccagctgatcaacgacgacgtgatcgatgaggacaccatcatcaacatcgagatggcccgggacctgatgaacgccaacgagcggaaggcgctgcagaactggcagcgccgccgggaggacgagcggaagaagtacgccgccgagatcgtgaagcactacaaggcctccggcatcaacgccgagcccagcaacaacgacatcctgaagtaccagctgtgggaggagcagaaccacatctgcctgtacaccggcaagaacatcgccctgcaccagttcctgggcagcaaccccgagttcgacatcgagcacaccatcccccagagcctgagcttcgacaactcccaggtgaacatcaccctgtgcgacagcaagtacaaccgcaccgtgaagcggaacaagatcccctacgagctgaacaaccccgacatcctgctgcggatccaccactggaagaaggagtacgagaacatcgacaaggacatccagaagtgcatcaagaacgcccggggcgcctccaccaaggaggacaaggaccggcacatcatccgccggcaccagctgaccacccagcggaactacatccgggagaagtaccagagcttcacccggaaggacgtgcccagcggcttcaagaacagccagctggtggacatcgggctgatcaccaagtacgcccggctgtacctcaagaccgtgttcgaccgggtgaacacggtcaaggggaccaccgtggccgacttccggaagctgtggggcctgcagaacgcctacgagacaaaggcccgggtgaaccacatccaccactgcatcgacgccatcaccatcgcctgcatgaccaagccccagtacgacaagctggccaagttctaccacgactgggagtgcctgaaggaggagggcgtcgacaagaagcccgtgttcgagaagccctggcccaccttcaccgaggacgtgaaggggatcgagaacgagatcctgatctcccactacacccccgacagcttcgccaagcagagcaagaagctgctgcggaagcgggggatcatccagaaggacaagaacgggaaccccatcgtgctgaagggggacaccgtgcggggcagcctgcacaaggagacattctacggggccatcgagcgcacccaggccaacaagaagggcgagctggagaaggtgatcaagtacgtggtgcggaagaaggtgagcgacctgtccgacaccgacgtgaagaacatcgtggacgaccgcatccgggagatcgtgggcaacgcccgcaacgaggagaagaagatccagaaggagatcgagcggctgaagaaggacctgcagaaggccgaggagcacgaggagcccgccatcaacgacaagatctgcgtgctccagaccgagatcgagcagctgtactccctgcccaacaagaagggggcccccatccccatcaagaaggtgcggctgctccagcccagcgtcaccaaccccctctgcatcaagaagcagagggacgtgtccaccaagaagcccaaggagtacaagcagaactactacgccgccaacgacggcaactacctgatggccatctacgagggcaaggacgccaagggcaagatcaagcgggacttcgagatcgtgaacaacatcaccgccggcgagttcttcaagcagtccgtgcagggggacctgaagccccagggcatcagcaccaacggcgggctgatccccaagcagaaggagaacgggaagctggtgctgccctacaagagcagcatcaagatcgggacgatgatcatcctgtgggagaagtctcccacagaggtgttcgacctggagctgaacgagatcaagcggcggctctacaaggtcgtgggcctgagcgcccagaagctgaagatcagcggcaagtcctacaactacgccaccatcgtgctgcggcaccaccaggaggccagcagcagcagcgacctcaagacctacgatggggcgttcaagcgggacgagacatacatgggccagcggaagctgaaccacaaccagttcaacgccctggtggagaacatcgacttcgacatgaacaccaagggcaccatcaagtggatcaagcac

SEQ ID NO: 177 - DNA, 3906 bp, synthetic construct
  source 1..3906: mol_type = other DNA
atggccaaggtgctggggctggacctcggcaccaacagcatcggctgggccgtggtggaaaccgaggacaacaagaacttcgagctgtgcgagaagggcgtgcgcatcttccaggagggcgtgaagatcgagaaggggatcgagggctccaaggccgaggagcgcacgcgctaccgcagcgcccgccggctgaagttccggcggaagctgcggaagatcaacaccatcaaggccctgatggaggccgactactgccccaagctgagcgacgaggagctgaacaactggcggttcagcaaggtgtaccccaccaacgtggagttccgcacctggctgctgaccaacgacagcctgaacaagaacccctacttctaccgcaacctgggggtgacccggaacctggacctgtcccagaaggagaaccggtacaagatcggccgggccttctaccacctgtcccagcggcggggcttcctgtccaaccgcctggaggggaccaaggagagcgacggggccatcaagaaggagatctccgagctgacccaggagaagaaggacaagaccctggggcagtacttctacgccaagtacaacaacggcgagaagatccgggaccactacacccaccgggaggaccactacctggaggagttccggcggatctgcaaggtgcagaagatcgactccgggttcaagtccgacctggagaaggccatcttctaccagcggcccctgaagtcccagaaggggctgatcgggaagtgccccttcgagaagaacaagccccggtgctccgtgagccaccccctgttcgaggagtaccgcatgctgtgcttcatcaacaacatcaagatcaagacccccgacgacgagaagctgcgcttcctgaaccccctggagaagaaggagatcgagcccctgttctaccgcaagagcaaggagcacttcgacttcgaggacatcgccaagctgctggcccccaagaagcagtacaagtactacaagtcccgggagaagcactccgaggactacctgttcaactacagcatgaaaaccaccgtgagcgggtgccccgtgagcgcccgcttcgagtccatcttcgggaagaactggaaggacctgaagatcgagcacacccggaagaacgacgggaagctctccttcatcgacatctacgacgtgtggcacgtcctgttcaccttcgacaacgaggagaagctgaccgagttcgcccaggccaagctgtgcctgcaggacgagaagctgaaggagttcgtgcacaagatccacctgaagcacgactacgccagcctctccctgaaggccatcaagaaggtgctgccctacctgcgggagggcctgatctacagccacgccatcttcctggggaacatgggcaacgccatctcccaggagatctggtcccaggaggagaaccgcaagatcatccagcaggagatcctggagatcatcaagaaccagaaccaggagaagcagatcatcgaggtggtgaacggcctgatcaagaagtgcaaggacaacaagtggtactggtccgaggaggccaaggagaagtacaagaaggacatcgagaagaacatcatctcggtgttcggcacctcccgctggaacaagctggagttcgagatccagaacgacatcgtgaacaacgccctgaacaagttcaaggagcagatccagaagcagaacggcaagagcggcttcctgcagatcgagacaatcgacgagcgggtgaagtccttcctggtgggcaacttcgacgccgagaaggaggacctcgagaagctgtaccaccccagcgccatcgaggtgttcaagcagcccctgcgggccgaggacgggcgcaagtacctgggcagcccgatggtgtcctccgtgcgcaaccccatggccatgcgggccctgcaccagctgcgcaagctgatcaacgagctgatcaagcaggacatcatcgacgagcggaccaagatcaacatcgagatgtcccgggacctgaagaacgccaacgagcggaaggccctgcagagctggcagcgggaccgggagaagctccacaaggagtactcctcccggatccaggagcacttcaactccgagggcatcaagcgggagccctccgacgacgacatcctgaagtaccagctgtgggaggagcaggagcacaagtgcgtgtacaccggctcctccatcggggtgtccgacttcctggggaacagccccagcttcgacatcgagcacaccatcccccgctccctgtccttcgacaacagccagcagaacaagacgctgtgccagtcccggttcaaccgcaacaccaagcggaacaagatccccagcgagctgagcaaccaccacgagatcctggagcggatcgagaactggaagaagaagtacgaggagctcgacaagcagatccagaagcaggtgatccgctccaagaccgccgccaccaaggacagcaaggactccgccatccagcggcggcacaagctggtggaggagcggaactactggaagggcaagtacgagaagttcgccatgatcgacgtgccctccggcttcaagaacagccagatggtggacatcggcatcatcaccaagtactcccggctgtacctcaagaccctgttcgacaaggtgtacaccgtgaagggcaacaccgtggccgacttccgggtcatctggggcctgcagaaggagtacgagaagaaggcccgggtgaaccacatccaccactgcatcgacgccatcaccatcgcctgcatgtccaagcagaactacgacaacctggccaagttctaccacgagagcgaggagcggtccatcgccggggacaacaagaagccccacgtggccaagccctggcccaccttcagcgaggacgtgaagggggtggagaaggaggtgctgatctcccactacacccccgacaacctgcacaagcagagcaagaagaagctgcggaaccgcggcaagatcgagaagaacatccagggcgagatcatctaccagaagggcgacaccgtgcgggggtccctgcacaaggagactttctacggcgccatcaagcgggagatcaccaacaagaagggggagaaggaggagaaggtgctgtacgtggtgcggaagcccatcgactccctgtccgccggcgacatcaagaacatcgtggaccacacggtccgcgagaaggtgcaggccgccatcaacgagaaggggatcaagcaggccctgaacgagacaatctggatgaaccaggagaagcagatccccatcaagaaggtgcggtgctacgcccccaccgtgaccaagcccatccacctgaagaaccaccgggacctgtccaagcacgactacaagcactcctaccacgtggccaacgacggcaactacctgatggccatctacgagggggaggacgacaagggcaaggtcaagcgggacttcgagatcgtgaacaacctgaaggccggggagtacttcaagcagagcgtgcaggaggtgctgaaggcccaggggatcaaccacctggagggcctggtgccgccctccaagtacatcaagaacgtggaggccccgctgaagcagatcatcaagaccggcacgatggtgctgctgtgggaggaaacctccgacgagatctgggagctggacaacaaccagaagaacatccggctctacaagatcgtgaagttcgacaagagcggccggatctacttccggccccacaacgaggcccggcccgcctccgagctgaaggaggtgtacaacctgaacgccaacaagcagtgcgagcagctgcggctgcccgtgaacaagttcaacgccctggtggagggctacgacttcaagatcaacgtgctgggccagatcgagaagctgaag

SEQ ID NO: 178-180 - skipped (3 entries)

SEQ ID NO: 181 - DNA, 4038 bp, synthetic construct
  source 1..4038: mol_type = other DNA
atgtccatcgccgagaagaacaacagcgagtactacctcggcctggacatcggcaccgacagcgtgggctgggccgtgaccgacctggactacaacatccagaagttcaacggcaaggccatgtggggcatccgcctgttcgaggccggcaagacggccgccgagcggcgggtgttccgcaccacccggcgccgcatccagcggcgcaagcaccgcatcgagctgctgcaggagctgttcgacagcgagatctccaaggccgacaccaacttctacctgcggctgaaggagagcaagtactgggtggaggaccgcacgctggggcagaccaacatcctgttcaacgaccccgagtacaccgacaaggactactacaagcagtaccccaccatctaccacctgcggaaggagctgatgaccagcgacgagccgcacgacgtgcggctcgtctacctggccatccaccacctgatcaagaaccggggccacttcctgttcgagggggagggccggaaggacgtcagctccttcaaggtgatcttccgggagctgtgccagtccatgcacgacgagatggagatcgtgctggaggccgccgacctggacgaggtggaggcggtgctgaagaaccgggagtacgggatcaccgacaagaaaacccggctgaacaagctcctgaccatcgacgacgagcacaagaaggagcagaagtccatcatcgccctgctggccgggggcaagaccaaggtggacgccctgttcggggagaaaacctccgaggacagcgacgtgaaggacatcaccttcgccggggacaagttcgaggagagcttcgacgccctgagcatcatgctcggggacaagatgttctgcctcgagaagatgaaggccatctacgactggtccatcctggaggagatcctccagggcgaggactacctgtcctacgccaaggtggccacctacgagaagcacaagaacgacctggccaccctgaagaagatcatgaagaagtaccggtccgacgagtacgacgcctgcttcaaggaccccggcaagaaggacaactactgcgcctacgtggggatggccaagaagggcaagaagaagctggtgctggagaagaagtgctcccaggaggacctgtgcaagtacctgggcaaggtgttcaaggacgtgaagcagaacgaccccgacctgcagtacctgatggccgagatccagcggggcaccctgctgcccaagcaggtgaacaaggacaacggggtcatcccccaccagctccacctggaggagctgcggatgatcctggccaacgtgaagaagtacctggagttcctgaacgacaaggacgactccgggttcaccgtgagcgagaagatcgagaagatcttcgccttccggatcccctactacgtggggcccctgaacgcccaccacaagtccctgggccactgctggatcgtgcggaacaagggcatggagaaccagaaggtgctgccctggaacttcgacgagatcgtgaacctggaggccagcgccaccgccttcatccgcaagatgaccagcaagtgcacctacgtgatcggcgccgacgtggtgcccaagaactccctggtgtacagcgagtttatggtgctgaacgagctgaacaacgtgaaggtgaacggggagctgctgcccgtcgagctgaaggagaaggtgttcgaggaggtgttcaagcgggtgaagcgggtgaccgggaagcggctgcgcgacttcctgatcgccgagggggccttcaagaagggcgacgagctgtccgggttcgaccagaacttcaagggctccctcaccgcctacctggacttcaagcgcatcctgggggagaagaagatccccaaggaggccatcgaggagatgatccaggccatcgtgctgttcggcgacgaccgcaagctgctgaagcggcgggtggagaagcggtacggcgagctgctctccaaggaggagatcgccgccatctgcaagctgaagtacaccggctggggccggctgagccgggagttcctggaggagatctacgtggtgaaccacaagaccggggagatgatcaacatcatctccatgatgcacgggaccaacgccaacctgatgcagctgctgagcagcgagtaccggttcaccgaggccctggaggcctacaacgaggagcggcagaccgaccactccgacatcgcctacgggatcgtgaaggacctgtacgtgagccccgccgtgcggcggtccatctggcagtccctgaagatcgtgaaggagatcgccaagatcaagaaggccgcccccaagaaggtgttcgtggaggtggcccgggagaacgccgagaagaagcggaccgtgtcccggaagaacgcgctgatcgccctgtacaagaactgcaaggaggaggagcgcgactggatcgccgagctcgacgccaagaccgaccacgagctgcggcgggaccggctgtacctgtactacacccagatgggccggtgcatgtacaccggcaagcccatcgacctgaaccggctgttcgacaccaacgtgtacgacgtggaccacatcttcccccagtccaagatcaaggacgacagcctgtccaaccgggtgctggtggagcggaaggtgaacgccaagaagtccgacgtgtaccccctgcccgaggagatccggaacaagaaccggggcttctggacaatgctgcaccgcaaggagctgatctccaagcggaagtacgaccggctcacccgggtgacccccttcagcgactccgagctggccgacttcatcgcccgccagctggtggagacacgccagagcaccaaggccgtggcccaggtgctgaagaaggtgttccccgacaccgacgtggtgtacgtgaaggccgggaacgtgtcccggttcaggtacgacttcaagatgatcaaggtgcgggaggtgaacgactaccaccacgccaaggacgcctacctgaacatcgtggtgggcaacgtgtacgacaccaagttcaccaagagccccctgaacttcatccaggggaaggacgggaagaactactccctgaaccagatgttcaactacgacgtggagcggtccggcgtgatcgcctggaaggccggcgagaagggcaccatcaccaccgtgaagcggatgatgaagaagaacaacatccagttcacccgccacgccttcgaggtgaagggcgggctgttcgaccagaccatcatgaagaagggcaagggccaggtgcccatcaagagctccgacgtgcacctgagcgacatcagcaagtacggcggctacaacaaggccgccggcgcctacttcttcctggtggagcacaccgtgaagaagaagcgcatccgcaccctggagttcgccccggtgtacctggccaagaagctggagaaccggtccgccctgctggagtactgcaagaacgagctgaacctgctggagagcaggatcctgctgcccaaggtgaagatcaacacgatgttcgagatcgacggcttcaagatgcacatctccggccggaccggcaagcaggtcatcttcaagggcgccgagcagctgtgcatctccgagcagtacggcctggacatcaagaagatcaacaagtacatccagcggtgcaagctggcccgggagaacctgcccgtgaccgccttcgacggcatcagcacccacaacaacgacgtgctgtacagcgtgatgatgcagaagctgaaggacaccgtgtacggcatccacctgtccagccagctgaagaacctggagaagggcaaggaggtgttcgggaagctgtccctgaaggagcagtgcgaggtgctgatggaggccctgaacctgttcagctgcaacagcctgagcgccaacttcaagctgatcaacagcggggcctcctgcggcaccctgcagctgtccaacaacttcagcaaccgcaagtccttcatcctgtacaaccagtccatcaccgggctgttcgagcagaaggtggacctgctgcggctg

SEQ ID NO: 182 - DNA, 4038 bp, synthetic construct
  source 1..4038: mol_type = other DNA
atgtccatcgccgagaagaacaacagcgagtactacctcggcctggacatcggcaccgacagcgtgggctgggccgtgaccgacctggactacaacatccagaagttcaacggcaaggccatgtggggcatccgcctgttcgaggccggcaagacggccgccgagcggcgggtgttccgcaccacccggcgccgcatccagcggcgcaagcaccgcatcgagctgctgcaggagctgttcgacagcgagatctccaaggccgacaccaacttctacctgcggctgaaggagagcaagtactgggtggaggaccgcacgctggggcagaccaacatcctgttcaacgaccccgagtacaccgacaaggactactacaagcagtaccccaccatctaccacctgcggaaggagctgatgaccagcgacgagccgcacgacgtgcggctcgtctacctggccatccaccacctgatcaagaaccggggccacttcctgttcgagggggagggccggaaggacgtcagctccttcaaggtgatcttccgggagctgtgccagtccatgcacgacgagatggagatcgtgctggaggccgccgacctggacgaggtggaggcggtgctgaagaaccgggagtacgggatcaccgacaagaaaacccggctgaacaagctcctgaccatcgacgacgagcacaagaaggagcagaagtccatcatcgccctgctggccgggggcaagaccaaggtggacgccctgttcggggagaaaacctccgaggacagcgacgtgaaggacatcaccttcgccggggacaagttcgaggagagcttcgacgccctgagcatcatgctcggggacaagatgttctgcctcgagaagatgaaggccatctacgactggtccatcctggaggagatcctccagggcgaggactacctgtcctacgccaaggtggccacctacgagaagcacaagaacgacctggccaccctgaagaagatcatgaagaagtaccggtccgacgagtacgacgcctgcttcaaggaccccggcaagaaggacaactactgcgcctacgtggggatggccaagaagggcaagaagaagctggtgctggagaagaagtgctcccaggaggacctgtgcaagtacctgggcaaggtgttcaaggacgtgaagcagaacgaccccgacctgcagtacctgatggccgagatccagcggggcaccctgctgcccaagcaggtgaacaaggacaacggggtcatcccccaccagctccacctggaggagctgcggatgatcctggccaacgtgaagaagtacctggagttcctgaacgacaaggacgactccgggttcaccgtgagcgagaagatcgagaagatcttcgccttccggatcccctactacgtggggcccctgaacgcccaccacaagtccctgggccactgctggatcgtgcggaacaagggcatggagaaccagaaggtgctgccctggaacttcgacgagatcgtgaacctggaggccagcgccaccgccttcatccgcaagatgaccagcaagtgcacctacgtgatcggcgccgacgtggtgcccaagaactccctggtgtacagcgagtttatggtgctgaacgagctgaacaacgtgaaggtgaacggggagctgctgcccgtcgagctgaaggagaaggtgttcgaggaggtgttcaagcgggtgaagcgggtgaccgggaagcggctgcgcgacttcctgatcgccgagggggccttcaagaagggcgacgagctgtccgggttcgaccagaacttcaagggctccctcaccgcctacctggacttcaagcgcatcctgggggagaagaagatccccaaggaggccatcgaggagatgatccaggccatcgtgctgttcggcgacgaccgcaagctgctgaagcggcgggtggagaagcggtacggcgagctgctctccaaggaggagatcgccgccatctgcaagctgaagtacaccggctggggccggctgagccgggagttcctggaggagatctacgtggtgaaccacaagaccggggagatgatcaacatcatctccatgatgcacgggaccaacgccaacctgatgcagctgctgagcagcgagtaccggttcaccgaggccctggaggcctacaacgaggagcggcagaccgaccactccgacatcgcctacgggatcgtgaaggacctgtacgtgagccccgccgtgcggcggtccatctggcagtccctgaagatcgtgaaggagatcgccaagatcaagaaggccgcccccaagaaggtgttcgtggaggtggcccgggagaacgccgagaagaagcggaccgtgtcccggaagaacgcgctgatcgccctgtacaagaactgcaaggaggaggagcgcgactggatcgccgagctcgacgccaagaccgaccacgagctgcggcgggaccggctgtacctgtactacacccagatgggccggtgcatgtacaccggcaagcccatcgacctgaaccggctgttcgacaccaacgtgtacgacgtggaccacatcttcccccagtccaagatcaaggacgacagcctgtccaaccgggtgctggtggagcggaaggtgaacgccaagaagtccgacgtgtaccccctgcccgaggagatccggaacaagaaccggggcttctggacaatgctgcaccgcaaggagctgatctccaagcggaagtacgaccggctcacccgggtgacccccttcagcgactccgagctggccgacttcatcgcccgccagctggtggagacacgccagagcaccaaggccgtggcccaggtgctgaagaaggtgttccccgacaccgacgtggtgtacgtgaaggccgggaacgtgtcccggttcaggtacgacttcaagatgatcaaggtgcgggaggtgaacgactaccaccacgccaaggacgcctacctgaacatcgtggtgggcaacgtgtacgacaccaagttcaccaagagccccctgaacttcatccaggggaaggacgggaagaactactccctgaaccagatgttcaactacgacgtggagcggtccggcgtgatcgcctggaaggccggcgagaagggcaccatcaccaccgtgaagcggatgatgaagaagaacaacatccagttcacccgccacgccttcgaggtgaagggcgggctgttcgaccagaccatcatgaagaagggcaagggccaggtgcccatcaagagctccgacgtgcacctgagcgacatcagcaagtacggcggctacaacaaggccgccggcgcctacttcttcctggtggagcacaccgtgaagaagaagcgcatccgcaccctggagttcgccccggtgtacctggccaagaagctggagaaccggtccgccctgctggagtactgcaagaacgagctgaacctgctggagagcaggatcctgctgcccaaggtgaagatcaacacgatgttcgagatcgacggcttcaagatgcacatctccggccggaccggcaagcaggtcatcttcaagggcgccgagcagctgtgcatctccgagcagtacggcctggacatcaagaagatcaacaagtacatccagcggtgcaagctggcccgggagaacctgcccgtgaccgccttcgacggcatcagcacccacaacaacgacgtgctgtacagcgtgatgatgcagaagctgaaggacaccgtgtacggcatccacctgtccagccagctgaagaacctggagaagggcaaggaggtgttcgggaagctgtccctgaaggagcagtgcgaggtgctgatggaggccctgaacctgttcagctgcaacagcctgagcgccaacttcaagctgatcaacagcggggcctcctgcggcaccctgaacctgtccaacaacttcagcaaccgcaagtccttcatcctgtacaaccagtccatcaccgggctgttcgagcagaaggtggacctgctgcggctg

SEQ ID NO: 183 - DNA, 4038 bp, synthetic construct
  source 1..4038: mol_type = other DNA
atgtccatcgccgagaagaacaacagcgagtactacctcggcctggacatcggcaccgacagcgtgggctgggccgtgaccgacctggactacaacatccagaagttcaacggcaaggccatgtggggcatccgcctgttcgaggccggcaagacggccgccgagcggcgggtgttccgcaccacccggcgccgcatccagcggcgcaagcaccgcatcgagctgctgcaggagctgttcgacagcgagatctccaaggccgacaccaacttctacctgcggctgaaggagagcaagtactgggtggaggaccgcacgctggggcagaccaacatcctgttcaacgaccccgagtacaccgacaaggactactacaagcagtaccccaccatctaccacctgcggaaggagctgatgaccagcgacgagccgcacgacgtgcggctcgtctacctggccatccaccacctgatcaagaaccggggccacttcctgttcgagggggagggccggaaggacgtcagctccttcaaggtgatcttccgggagctgtgccagtccatgcacgacgagatggagatcgtgctggaggccgccgacctggacgaggtggaggcggtgctgaagaaccgggagtacgggatcaccgacaagaaaacccggctgaacaagctcctgaccatcgacgacgagcacaagaaggagcagaagtccatcatcgccctgctggccgggggcaagaccaaggtggacgccctgttcggggagaaaacctccgaggacagcgacgtgaaggacatcaccttcgccggggacaagttcgaggagagcttcgacgccctgagcatcatgctcggggacaagatgttctgcctcgagaagatgaaggccatctacgactggtccatcctggaggagatcctccagggcgaggactacctgtcctacgccaaggtggccacctacgagaagcacaagaacgacctggccaccctgaagaagatcatgaagaagtaccggtccgacgagtacgacgcctgcttcaaggaccccggcaagaaggacaactactgcgcctacgtggggatggccaagaagggcaagaagaagctggtgctggagaagaagtgctcccaggaggacctgtgcaagtacctgggcaaggtgttcaaggacgtgaagcagaacgaccccgacctgcagtacctgatggccgagatccagcggggcaccctgctgcccaagcaggtgaacaaggacaacggggtcatcccccaccagctccacctggaggagctgcggatgatcctggccaacgtgaagaagtacctggagttcctgaacgacaaggacgactccgggttcaccgtgagcgagaagatcgagaagatcttcgccttccggatcccctactacgtggggcccctgaacgcccaccacaagtccctgggccactgctggatcgtgcggaacaagggcatggagaaccagaaggtgctgccctggaacttcgacgagatcgtgaacctggaggccagcgccaccgccttcatccgcaagatgaccagcaagtgcacctacgtgatcggcgccgacgtggtgcccaagaactccctggtgtacagcgagtttatggtgctgaacgagctgaacaacgtgaaggtgaacggggagctgctgcccgtcgagctgaaggagaaggtgttcgaggaggtgttcaagcgggtgaagcgggtgaccgggaagcggctgcgcgacttcctgatcgccgagggggccttcaagaagggcgacgagctgtccgggttcgaccagaacttcaagggctccctcaccgcctacctggacttcaagcgcatcctgggggagaagaagatccccaaggaggccatcgaggagatgatccaggccatcgtgctgttcggcgacgaccgcaagctgctgaagcggcgggtggagaagcggtacggcgagctgctctccaaggaggagatcgccgccatctgcaagctgaagtacaccggctggggccggctgagccgggagttcctggaggagatctacgtggtgaaccacaagaccggggagatgatcaacatcatctccatgatgcacgggaccaacgccaacctgatgcagctgctgagcagcgagtaccggttcaccgaggccctggaggcctacaacgaggagcggcagaccgaccactccgacatcgcctacgggatcgtgaaggacctgtacgtgagccccgccgtgcggcggtccatctggcagtccctgaagatcgtgaaggagatcgccaagatcaagaaggccgcccccaagaaggtgttcgtggaggtggcccgggagaacgccgagaagaagcggaccgtgtcccggaagaacgcgctgatcgccctgtacaagaactgcaaggaggaggagcgcgactggatcgccgagctcgacgccaagaccgaccacgagctgcggcgggaccggctgtacctgtactacacccagatgggccggtgcatgtacaccggcaagcccatcgacctgaaccggctgttcgacaccaacgtgtacgacgtggaccacatcttcccccagtccaagatcaaggacgacagcctgtccaaccgggtgctggtggagcggaaggtgaacgccaagaagtccgacgtgtaccccctgcccgaggagatccggaacaagaaccggggcttctggacaatgctgcaccgcaaggagctgatctccaagcggaagtacgaccggctcacccgggtgacccccttcagcgactccgagctggccgacttcatcgcccgccagctggtggagacacgccagagcaccaaggccgtggcccaggtgctgaagaaggtgttccccgacaccgacgtggtgtacgtgaaggccgggaacgtgtcccggttcaggtacgacttcaagatgatcaaggtgcgggaggtgaacgactaccaccacgccaaggacgcctacctgaacatcgtggtgggcaacgtgtacgacaccaagttcaccaagagccccctgaacttcatccaggggaaggacgggaagaactactccctgaaccagatgttcaactacgacgtggagcggtccggcgtgatcgcctggaaggccggcgagaagggcaccatcaccaccgtgaagcggatgatgaagaagaacaacatccagttcacccgccacgccttcgaggtgaagggcgggctgttcgaccagaccatcatgaagaagggcaagggccaggtgcccatcaagagctccgacgtgcacctgagcgacatcagcaagtacggcggctacaacaaggccgccggcgcctacttcttcctggtggagcacaccgtgaagaagaagcgcatccgcaccctggagttcgccccggtgtacctggccaagaagctggagaaccggtccgccctgctggagtactgcaagaacgagctgaacctgctggagagcaggatcctgctgcccaaggtgaagatcaacacgatgttcgagatcgacggcttcaagatgcacatctccggccggaccggcaagcaggtcatcttcaagggcgccgagcagctgtgcatctccgagcagtacggcctggacatcaagaagatcaacaagtacatccagcggtgcaagctggcccgggagaacctgcccgtgaccgccttcgacggcatcagcacccacaacaacgacgtgctgtacagcgtgatgatgcagaagctgaaggacaccgtgtacggcatccacctgtccagccagctgaagaacctggagaagggcaaggaggtgttcgggaagctgtccctgaaggagcagtgcgaggtgctgatggaggccctgaacctgttcagctgcaacagcctgagcgccaacttcaagctgatcaacagcggggcctcctgcggcaccctgactctgtccaacaacttcagcaaccgcaagtccttcatcctgtacaaccagtccatcaccgggctgttcgagcagaaggtggacctgctgcggctg

SEQ ID NO: 184 - DNA, 4038 bp, synthetic construct
  source 1..4038: mol_type = other DNA
atgtccatcgccgagaagaacaacagcgagtactacctcggcctggacatcggcaccgacagcgtgggctgggccgtgaccgacctggactacaacatccagaagttcaacggcaaggccatgtggggcatccgcctgttcgaggccggcaagacggccgccgagcggcgggtgttccgcaccacccggcgccgcatccagcggcgcaagcaccgcatcgagctgctgcaggagctgttcgacagcgagatctccaaggccgacaccaacttctacctgcggctgaaggagagcaagtactgggtggaggaccgcacgctggggcagaccaacatcctgttcaacgaccccgagtacaccgacaaggactactacaagcagtaccccaccatctaccacctgcggaaggagctgatgaccagcgacgagccgcacgacgtgcggctcgtctacctggccatccaccacctgatcaagaaccggggccacttcctgttcgagggggagggccggaaggacgtcagctccttcaaggtgatcttccgggagctgtgccagtccatgcacgacgagatggagatcgtgctggaggccgccgacctggacgaggtggaggcggtgctgaagaaccgggagtacgggatcaccgacaagaaaacccggctgaacaagctcctgaccatcgacgacgagcacaagaaggagcagaagtccatcatcgccctgctggccgggggcaagaccaaggtggacgccctgttcggggagaaaacctccgaggacagcgacgtgaaggacatcaccttcgccggggacaagttcgaggagagcttcgacgccctgagcatcatgctcggggacaagatgttctgcctcgagaagatgaaggccatctacgactggtccatcctggaggagatcctccagggcgaggactacctgtcctacgccaaggtggccacctacgagaagcacaagaacgacctggccaccctgaagaagatcatgaagaagtaccggtccgacgagtacgacgcctgcttcaaggaccccggcaagaaggacaactactgcgcctacgtggggatggccaagaagggcaagaagaagctggtgctggagaagaagtgctcccaggaggacctgtgcaagtacctgggcaaggtgttcaaggacgtgaagcagaacgaccccgacctgcagtacctgatggccgagatccagcggggcaccctgctgcccaagcaggtgaacaaggacaacggggtcatcccccaccagctccacctggaggagctgcggatgatcctggccaacgtgaagaagtacctggagttcctgaacgacaaggacgactccgggttcaccgtgagcgagaagatcgagaagatcttcgccttccggatcccctactacgtggggcccctgaacgcccaccacaagtccctgggccactgctggatcgtgcggaacaagggcatggagaaccagaaggtgctgccctggaacttcgacgagatcgtgaacctggaggccagcgccaccgccttcatccgcaagatgaccagcaagtgcacctacgtgatcggcgccgacgtggtgcccaagaactccctggtgtacagcgagtttatggtgctgaacgagctgaacaacgtgaaggtgaacggggagctgctgcccgtcgagctgaaggagaaggtgttcgaggaggtgttcaagcgggtgaagcgggtgaccgggaagcggctgcgcgacttcctgatcgccgagggggccttcaagaagggcgacgagctgtccgggttcgaccagaacttcaagggctccctcaccgcctacctggacttcaagcgcatcctgggggagaagaagatccccaaggaggccatcgaggagatgatccaggccatcgtgctgttcggcgacgaccgcaagctgctgaagcggcgggtggagaagcggtacggcgagctgctctccaaggaggagatcgccgccatctgcaagctgaagtacaccggctggggccggctgagccgggagttcctggaggagatctacgtggtgaaccacaagaccggggagatgatcaacatcatctccatgatgcacgggaccaacgccaacctgatgcagctgctgagcagcgagtaccggttcaccgaggccctggaggcctacaacgaggagcggcagaccgaccactccgacatcgcctacgggatcgtgaaggacctgtacgtgagccccgccgtgcggcggtccatctggcagtccctgaagatcgtgaaggagatcgccaagatcaagaaggccgcccccaagaaggtgttcgtggaggtggcccgggagaacgccgagaagaagcggaccgtgtcccggaagaacgcgctgatcgccctgtacaagaactgcaaggaggaggagcgcgactggatcgccgagctcgacgccaagaccgaccacgagctgcggcgggaccggctgtacctgtactacacccagatgggccggtgcatgtacaccggcaagcccatcgacctgaaccggctgttcgacaccaacgtgtacgacgtggaccacatcttcccccagtccaagatcaaggacgacagcctgtccaaccgggtgctggtggagcggaaggtgaacgccaagaagtccgacgtgtaccccctgcccgaggagatccggaacaagaaccggggcttctggacaatgctgcaccgcaaggagctgatctccaagcggaagtacgaccggctcacccgggtgacccccttcagcgactccgagctggccgacttcatcgcccgccagctggtggagacacgccagagcaccaaggccgtggcccaggtgctgaagaaggtgttccccgacaccgacgtggtgtacgtgaaggccgggaacgtgtcccggttcaggtacgacttcaagatgatcaaggtgcgggaggtgaacgactaccaccacgccaaggacgcctacctgaacatcgtggtgggcaacgtgtacgacaccaagttcaccaagagccccctgaacttcatccaggggaaggacgggaagaactactccctgaaccagatgttcaactacgacgtggagcggtccggcgtgatcgcctggaaggccggcgagaagggcaccatcaccaccgtgaagcggatgatgaagaagaacaacatccagttcacccgccacgccttcgaggtgaagggcgggctgttcgaccagaccatcatgaagaagggcaagggccaggtgcccatcaagagctccgacgtgcacctgagcgacatcagcaagtacggcggctacaacaaggccaacggcgcctacttcttcctggtggagcacaccgtgaagaagaagcgcatccgcaccctggagttcgccccggtgtacctggccaagaagctggagaaccggtccgccctgctggagtactgcaagaacgagctgaacctgctggagagcaggatcctgctgcccaaggtgaagatcaacacgatgttcgagatcgacggcttcaagatgcacatctccggccggaccggcaagcaggtcatcttcaagggcgccgagcagctgtgcatctccgagcagtacggcctggacatcaagaagatcaacaagtacatccagcggtgcaagctggcccgggagaacctgcccgtgaccgccttcgacggcatcagcacccacaacaacgacgtgctgtacagcgtgatgatgcagaagctgaaggacaccgtgtacggcatccacctgtccagccagctgaagaacctggagaagggcaaggaggtgttcgggaagctgtccctgaaggagcagtgcgaggtgctgatggaggccctgaacctgttcagctgcaacagcctgagcgccaacttcaagctgatcaacagcggggcctcctgcggcaccctgaagctgtccaacaacttcagcaaccgcaagtccttcatcctgtacaaccagtccatcaccgggctgttcgagcagaaggtggacctgctgcggctg

SEQ ID NO: 185 - DNA, 4038 bp, synthetic construct
  source 1..4038: mol_type = other DNA
atgtccatcgccgagaagaacaacagcgagtactacctcggcctggacatcggcaccgacagcgtgggctgggccgtgaccgacctggactacaacatccagaagttcaacggcaaggccatgtggggcatccgcctgttcgaggccggcaagacggccgccgagcggcgggtgttccgcaccacccggcgccgcatccagcggcgcaagcaccgcatcgagctgctgcaggagctgttcgacagcgagatctccaaggccgacaccaacttctacctgcggctgaaggagagcaagtactgggtggaggaccgcacgctggggcagaccaacatcctgttcaacgaccccgagtacaccgacaaggactactacaagcagtaccccaccatctaccacctgcggaaggagctgatgaccagcgacgagccgcacgacgtgcggctcgtctacctggccatccaccacctgatcaagaaccggggccacttcctgttcgagggggagggccggaaggacgtcagctccttcaaggtgatcttccgggagctgtgccagtccatgcacgacgagatggagatcgtgctggaggccgccgacctggacgaggtggaggcggtgctgaagaaccgggagtacgggatcaccgacaagaaaacccggctgaacaagctcctgaccatcgacgacgagcacaagaaggagcagaagtccatcatcgccctgctggccgggggcaagaccaaggtggacgccctgttcggggagaaaacctccgaggacagcgacgtgaaggacatcaccttcgccggggacaagttcgaggagagcttcgacgccctgagcatcatgctcggggacaagatgttctgcctcgagaagatgaaggccatctacgactggtccatcctggaggagatcctccagggcgaggactacctgtcctacgccaaggtggccacctacgagaagcacaagaacgacctggccaccctgaagaagatcatgaagaagtaccggtccgacgagtacgacgcctgcttcaaggaccccggcaagaaggacaactactgcgcctacgtggggatggccaagaagggcaagaagaagctggtgctggagaagaagtgctcccaggaggacctgtgcaagtacctgggcaaggtgttcaaggacgtgaagcagaacgaccccgacctgcagtacctgatggccgagatccagcggggcaccctgctgcccaagcaggtgaacaaggacaacggggtcatcccccaccagctccacctggaggagctgcggatgatcctggccaacgtgaagaagtacctggagttcctgaacgacaaggacgactccgggttcaccgtgagcgagaagatcgagaagatcttcgccttccggatcccctactacgtggggcccctgaacgcccaccacaagtccctgggccactgctggatcgtgcggaacaagggcatggagaaccagaaggtgctgccctggaacttcgacgagatcgtgaacctggaggccagcgccaccgccttcatccgcaagatgaccagcaagtgcacctacgtgatcggcgccgacgtggtgcccaagaactccctggtgtacagcgagtttatggtgctgaacgagctgaacaacgtgaaggtgaacggggagctgctgcccgtcgagctgaaggagaaggtgttcgaggaggtgttcaagcgggtgaagcgggtgaccgggaagcggctgcgcgacttcctgatcgccgagggggccttcaagaagggcgacgagctgtccgggttcgaccagaacttcaagggctccctcaccgcctacctggacttcaagcgcatcctgggggagaagaagatccccaaggaggccatcgaggagatgatccaggccatcgtgctgttcggcgacgaccgcaagctgctgaagcggcgggtggagaagcggtacggcgagctgctctccaaggaggagatcgccgccatctgcaagctgaagtacaccggctggggccggctgagccgggagttcctggaggagatctacgtggtgaaccacaagaccggggagatgatcaacatcatctccatgatgcacgggaccaacgccaacctgatgcagctgctgagcagcgagtaccggttcaccgaggccctggaggcctacaacgaggagcggcagaccgaccactccgacatcgcctacgggatcgtgaaggacctgtacgtgagccccgccgtgcggcggtccatctggcagtccctgaagatcgtgaaggagatcgccaagatcaagaaggccgcccccaagaaggtgttcgtggaggtggcccgggagaacgccgagaagaagcggaccgtgtcccggaagaacgcgctgatcgccctgtacaagaactgcaaggaggaggagcgcgactggatcgccgagctcgacgccaagaccgaccacgagctgcggcgggaccggctgtacctgtactacacccagatgggccggtgcatgtacaccggcaagcccatcgacctgaaccggctgttcgacaccaacgtgtacgacgtggaccacatcttcccccagtccaagatcaaggacgacagcctgtccaaccgggtgctggtggagcggaaggtgaacgccaagaagtccgacgtgtaccccctgcccgaggagatccggaacaagaaccggggcttctggacaatgctgcaccgcaaggagctgatctccaagcggaagtacgaccggctcacccgggtgacccccttcagcgactccgagctggccgacttcatcgcccgccagctggtggagacacgccagagcaccaaggccgtggcccaggtgctgaagaaggtgttccccgacaccgacgtggtgtacgtgaaggccgggaacgtgtcccggttcaggtacgacttcaagatgatcaaggtgcgggaggtgaacgactaccaccacgccaaggacgcctacctgaacatcgtggtgggcaacgtgtacgacaccaagttcaccaagagccccctgaacttcatccaggggaaggacgggaagaactactccctgaaccagatgttcaactacgacgtggagcggtccggcgtgatcgcctggaaggccggcgagaagggcaccatcaccaccgtgaagcggatgatgaagaagaacaacatccagttcacccgccacgccttcgaggtgaagggcgggctgttcgaccagaccatcatgaagaagggcaagggccaggtgcccatcaagagctccgacgtgcacctgagcgacatcagcaagtacggcggctacaacaaggccaagggcgcctacttcttcctggtggagcacaccgtgaagaagaagcgcatccgcaccctggagttcgccccggtgtacctggccaagaagctggagaaccggtccgccctgctggagtactgcaagaacgagctgaacctgctggagagcaggatcctgctgcccaaggtgaagatcaacacgatgttcgagatcgacggcttcaagatgcacatctccggccggaccggcaagcaggtcatcttcaagggcgccgagcagctgtgcatctccgagcagtacggcctggacatcaagaagatcaacaagtacatccagcggtgcaagctggcccgggagaacctgcccgtgaccgccttcgacggcatcagcacccacaacaacgacgtgctgtacagcgtgatgatgcagaagctgaaggacaccgtgtacggcatccacctgtccagccagctgaagaacctggagaagggcaaggaggtgttcgggaagctgtccctgaaggagcagtgcgaggtgctgatggaggccctgaacctgttcagctgcaacagcctgagcgccaacttcaagctgatcaacagcggggcctcctgcggcaccctgaagctgtccaacaacttcagcaaccgcaagtccttcatcctgtacaaccagtccatcaccgggctgttcgagcagaaggtggacctgctgcggctg

SEQ ID NO: 186 - DNA, 4038 bp, synthetic construct
  source 1..4038: mol_type = other DNA
atgtccatcgccgagaagaacaacagcgagtactacctcggcctggacatcggcaccgacagcgtgggctgggccgtgaccgacctggactacaacatccagaagttcaacggcaaggccatgtggggcatccgcctgttcgaggccggcaagacggccgccgagcggcgggtgttccgcaccacccggcgccgcatccagcggcgcaagcaccgcatcgagctgctgcaggagctgttcgacagcgagatctccaaggccgacaccaacttctacctgcggctgaaggagagcaagtactgggtggaggaccgcacgctggggcagaccaacatcctgttcaacgaccccgagtacaccgacaaggactactacaagcagtaccccaccatctaccacctgcggaaggagctgatgaccagcgacgagccgcacgacgtgcggctcgtctacctggccatccaccacctgatcaagaaccggggccacttcctgttcgagggggagggccggaaggacgtcagctccttcaaggtgatcttccgggagctgtgccagtccatgcacgacgagatggagatcgtgctggaggccgccgacctggacgaggtggaggcggtgctgaagaaccgggagtacgggatcaccgacaagaaaacccggctgaacaagctcctgaccatcgacgacgagcacaagaaggagcagaagtccatcatcgccctgctggccgggggcaagaccaaggtggacgccctgttcggggagaaaacctccgaggacagcgacgtgaaggacatcaccttcgccggggacaagttcgaggagagcttcgacgccctgagcatcatgctcggggacaagatgttctgcctcgagaagatgaaggccatctacgactggtccatcctggaggagatcctccagggcgaggactacctgtcctacgccaaggtggccacctacgagaagcacaagaacgacctggccaccctgaagaagatcatgaagaagtaccggtccgacgagtacgacgcctgcttcaaggaccccggcaagaaggacaactactgcgcctacgtggggatggccaagaagggcaagaagaagctggtgctggagaagaagtgctcccaggaggacctgtgcaagtacctgggcaaggtgttcaaggacgtgaagcagaacgaccccgacctgcagtacctgatggccgagatccagcggggcaccctgctgcccaagcaggtgaacaaggacaacggggtcatcccccaccagctccacctggaggagctgcggatgatcctggccaacgtgaagaagtacctggagttcctgaacgacaaggacgactccgggttcaccgtgagcgagaagatcgagaagatcttcgccttccggatcccctactacgtggggcccctgaacgcccaccacaagtccctgggccactgctggatcgtgcggaacaagggcatggagaaccagaaggtgctgccctggaacttcgacgagatcgtgaacctggaggccagcgccaccgccttcatccgcaagatgaccagcaagtgcacctacgtgatcggcgccgacgtggtgcccaagaactccctggtgtacagcgagtttatggtgctgaacgagctgaacaacgtgaaggtgaacggggagctgctgcccgtcgagctgaaggagaaggtgttcgaggaggtgttcaagcgggtgaagcgggtgaccgggaagcggctgcgcgacttcctgatcgccgagggggccttcaagaagggcgacgagctgtccgggttcgaccagaacttcaagggctccctcaccgcctacctggacttcaagcgcatcctgggggagaagaagatccccaaggaggccatcgaggagatgatccaggccatcgtgctgttcggcgacgaccgcaagctgctgaagcggcgggtggagaagcggtacggcgagctgctctccaaggaggagatcgccgccatctgcaagctgaagtacaccggctggggccggctgagccgggagttcctggaggagatctacgtggtgaaccacaagaccggggagatgatcaacatcatctccatgatgcacgggaccaacgccaacctgatgcagctgctgagcagcgagtaccggttcaccgaggccctggaggcctacaacgaggagcggcagaccgaccactccgacatcgcctacgggatcgtgaaggacctgtacgtgagccccgccgtgcggcggtccatctggcagtccctgaagatcgtgaaggagatcgccaagatcaagaaggccgcccccaagaaggtgttcgtggaggtggcccgggagaacgccgagaagaagcggaccgtgtcccggaagaacgcgctgatcgccctgtacaagaactgcaaggaggaggagcgcgactggatcgccgagctcgacgccaagaccgaccacgagctgcggcgggaccggctgtacctgtactacacccagatgggccggtgcatgtacaccggcaagcccatcgacctgaaccggctgttcgacaccaacgtgtacgacgtggaccacatcttcccccagtccaagatcaaggacgacagcctgtccaaccgggtgctggtggagcggaaggtgaacgccaagaagtccgacgtgtaccccctgcccgaggagatccggaacaagaaccggggcttctggacaatgctgcaccgcaaggagctgatctccaagcggaagtacgaccggctcacccgggtgacccccttcagcgactccgagctggccgacttcatcgcccgccagctggtggagacacgccagagcaccaaggccgtggcccaggtgctgaagaaggtgttccccgacaccgacgtggtgtacgtgaaggccgggaacgtgtcccggttcaggtacgacttcaagatgatcaaggtgcgggaggtgaacgactaccaccacgccaaggacgcctacctgaacatcgtggtgggcaacgtgtacgacaccaagttcaccaagagccccctgaacttcatccaggggaaggacgggaagaactactccctgaaccagatgttcaactacgacgtggagcggtccggcgtgatcgcctggaaggccggcgagaagggcaccatcaccaccgtgaagcggatgatgaagaagaacaacatccagttcacccgccacgccttcgaggtgaagggcgggctgttcgaccagaccatcatgaagaagggcaagggccaggtgcccatcaagagctccgacgtgcacctgagcgacatcagcaagtacggcggctacaacaaggccagaggcgcctacttcttcctggtggagcacaccgtgaagaagaagcgcatccgcaccctggagttcgccccggtgtacctggccaagaagctggagaaccggtccgccctgctggagtactgcaagaacgagctgaacctgctggagagcaggatcctgctgcccaaggtgaagatcaacacgatgttcgagatcgacggcttcaagatgcacatctccggccggaccggcaagcaggtcatcttcaagggcgccgagcagctgtgcatctccgagcagtacggcctggacatcaagaagatcaacaagtacatccagcggtgcaagctggcccgggagaacctgcccgtgaccgccttcgacggcatcagcacccacaacaacgacgtgctgtacagcgtgatgatgcagaagctgaaggacaccgtgtacggcatccacctgtccagccagctgaagaacctggagaagggcaaggaggtgttcgggaagctgtccctgaaggagcagtgcgaggtgctgatggaggccctgaacctgttcagctgcaacagcctgagcgccaacttcaagctgatcaacagcggggcctcctgcggcaccctgaagctgtccaacaacttcagcaaccgcaagtccttcatcctgtacaaccagtccatcaccgggctgttcgagcagaaggtggacctgctgcggctg

SEQ ID NO: 187 - DNA, 4038 bp, synthetic construct
  source 1..4038: mol_type = other DNA
atgtccatcgccgagaagaacaacagcgagtactacctcggcctggacatcggcaccgacagcgtgggctgggccgtgaccgacctggactacaacatccagaagttcaacggcaaggccatgtggggcatccgcctgttcgaggccggcaagacggccgccgagcggcgggtgttccgcaccacccggcgccgcatccagcggcgcaagcaccgcatcgagctgctgcaggagctgttcgacagcgagatctccaaggccgacaccaacttctacctgcggctgaaggagagcaagtactgggtggaggaccgcacgctggggcagaccaacatcctgttcaacgaccccgagtacaccgacaaggactactacaagcagtaccccaccatctaccacctgcggaaggagctgatgaccagcgacgagccgcacgacgtgcggctcgtctacctggccatccaccacctgatcaagaaccggggccacttcctgttcgagggggagggccggaaggacgtcagctccttcaaggtgatcttccgggagctgtgccagtccatgcacgacgagatggagatcgtgctggaggccgccgacctggacgaggtggaggcggtgctgaagaaccgggagtacgggatcaccgacaagaaaacccggctgaacaagctcctgaccatcgacgacgagcacaagaaggagcagaagtccatcatcgccctgctggccgggggcaagaccaaggtggacgccctgttcggggagaaaacctccgaggacagcgacgtgaaggacatcaccttcgccggggacaagttcgaggagagcttcgacgccctgagcatcatgctcggggacaagatgttctgcctcgagaagatgaaggccatctacgactggtccatcctggaggagatcctccagggcgaggactacctgtcctacgccaaggtggccacctacgagaagcacaagaacgacctggccaccctgaagaagatcatgaagaagtaccggtccgacgagtacgacgcctgcttcaaggaccccggcaagaaggacaactactgcgcctacgtggggatggccaagaagggcaagaagaagctggtgctggagaagaagtgctcccaggaggacctgtgcaagtacctgggcaaggtgttcaaggacgtgaagcagaacgaccccgacctgcagtacctgatggccgagatccagcggggcaccctgctgcccaagcaggtgaacaaggacaacggggtcatcccccaccagctccacctggaggagctgcggatgatcctggccaacgtgaagaagtacctggagttcctgaacgacaaggacgactccgggttcaccgtgagcgagaagatcgagaagatcttcgccttccggatcccctactacgtggggcccctgaacgcccaccacaagtccctgggccactgctggatcgtgcggaacaagggcatggagaaccagaaggtgctgccctggaacttcgacgagatcgtgaacctggaggccagcgccaccgccttcatccgcaagatgaccagcaagtgcacctacgtgatcggcgccgacgtggtgcccaagaactccctggtgtacagcgagtttatggtgctgaacgagctgaacaacgtgaaggtgaacggggagctgctgcccgtcgagctgaaggagaaggtgttcgaggaggtgttcaagcgggtgaagcgggtgaccgggaagcggctgcgcgacttcctgatcgccgagggggccttcaagaagggcgacgagctgtccgggttcgaccagaacttcaagggctccctcaccgcctacctggacttcaagcgcatcctgggggagaagaagatccccaaggaggccatcgaggagatgatccaggccatcgtgctgttcggcgacgaccgcaagctgctgaagcggcgggtggagaagcggtacggcgagctgctctccaaggaggagatcgccgccatctgcaagctgaagtacaccggctggggccggctgagccgggagttcctggaggagatctacgtggtgaaccacaagaccggggagatgatcaacatcatctccatgatgcacgggaccaacgccaacctgatgcagctgctgagcagcgagtaccggttcaccgaggccctggaggcctacaacgaggagcggcagaccgaccactccgacatcgcctacgggatcgtgaaggacctgtacgtgagccccgccgtgcggcggtccatctggcagtccctgaagatcgtgaaggagatcgccaagatcaagaaggccgcccccaagaaggtgttcgtggaggtggcccgggagaacgccgagaagaagcggaccgtgtcccggaagaacgcgctgatcgccctgtacaagaactgcaaggaggaggagcgcgactggatcgccgagctcgacgccaagaccgaccacgagctgcggcgggaccggctgtacctgtactacacccagatgggccggtgcatgtacaccggcaagcccatcgacctgaaccggctgttcgacaccaacgtgtacgacgtggaccacatcttcccccagtccaagatcaaggacgacagcctgtccaaccgggtgctggtggagcggaaggtgaacgccaagaagtccgacgtgtaccccctgcccgaggagatccggaacaagaaccggggcttctggacaatgctgcaccgcaaggagctgatctccaagcggaagtacgaccggctcacccgggtgacccccttcagcgactccgagctggccgacttcatcgcccgccagctggtggagacacgccagagcaccaaggccgtggcccaggtgctgaagaaggtgttccccgacaccgacgtggtgtacgtgaaggccgggaacgtgtcccggttcaggtacgacttcaagatgatcaaggtgcgggaggtgaacgactaccaccacgccaaggacgcctacctgaacatcgtggtgggcaacgtgtacgacaccaagttcaccaagagccccctgaacttcatccaggggaaggacgggaagaactactccctgaaccagatgttcaactacgacgtggagcggtccggcgtgatcgcctggaaggccggcgagaagggcaccatcaccaccgtgaagcggatgatgaagaagaacaacatccagttcacccgccacgccttcgaggtgaagggcgggctgttcgaccagaccatcatgaagaagggcaagggccaggtgcccatcaagagctccgacgtgcacctgagcgacatcagcaagtacggcggctacaacaaggccgccggcgcctacttcttcctggtggagcacaccgtgaagaagaagcgcatccgcaccctggagttcgccccggtgtacctggccaagaagctggagaaccggtccgccctgctggagtactgcaagaacgagctgaacctgctggagagcaggatcctgctgcccaaggtgaagatcaacacgatgttcgagatcgacggcttcaagatgcacatctccggccggaccggcaagaacgtcatcttcaagggcgccgagcagctgtgcatctccgagcagtacggcctggacatcaagaagatcaacaagtacatccagcggtgcaagctggcccgggagaacctgcccgtgaccgccttcgacggcatcagcacccacaacaacgacgtgctgtacagcgtgatgatgcagaagctgaaggacaccgtgtacggcatccacctgtccagccagctgaagaacctggagaagggcaaggaggtgttcgggaagctgtccctgaaggagcagtgcgaggtgctgatggaggccctgaacctgttcagctgcaacagcctgagcgccaacttcaagctgatcaacagcggggcctcctgcggcaccctgaagctgtccaacaacttcagcaaccgcaagtccttcatcctgtacaaccagtccatcaccgggctgttcgagcagaaggtggacctgctgcggctg

SEQ ID NO: 188 - DNA, 4038 bp, synthetic construct
  source 1..4038: mol_type = other DNA
atgtccatcgccgagaagaacaacagcgagtactacctcggcctggacatcggcaccgacagcgtgggctgggccgtgaccgacctggactacaacatccagaagttcaacggcaaggccatgtggggcatccgcctgttcgaggccggcaagacggccgccgagcggcgggtgttccgcaccacccggcgccgcatccagcggcgcaagcaccgcatcgagctgctgcaggagctgttcgacagcgagatctccaaggccgacaccaacttctacctgcggctgaaggagagcaagtactgggtggaggaccgcacgctggggcagaccaacatcctgttcaacgaccccgagtacaccgacaaggactactacaagcagtaccccaccatctaccacctgcggaaggagctgatgaccagcgacgagccgcacgacgtgcggctcgtctacctggccatccaccacctgatcaagaaccggggccacttcctgttcgagggggagggccggaaggacgtcagctccttcaaggtgatcttccgggagctgtgccagtccatgcacgacgagatggagatcgtgctggaggccgccgacctggacgaggtggaggcggtgctgaagaaccgggagtacgggatcaccgacaagaaaacccggctgaacaagctcctgaccatcgacgacgagcacaagaaggagcagaagtccatcatcgccctgctggccgggggcaagaccaaggtggacgccctgttcggggagaaaacctccgaggacagcgacgtgaaggacatcaccttcgccggggacaagttcgaggagagcttcgacgccctgagcatcatgctcggggacaagatgttctgcctcgagaagatgaaggccatctacgactggtccatcctggaggagatcctccagggcgaggactacctgtcctacgccaaggtggccacctacgagaagcacaagaacgacctggccaccctgaagaagatcatgaagaagtaccggtccgacgagtacgacgcctgcttcaaggaccccggcaagaaggacaactactgcgcctacgtggggatggccaagaagggcaagaagaagctggtgctggagaagaagtgctcccaggaggacctgtgcaagtacctgggcaaggtgttcaaggacgtgaagcagaacgaccccgacctgcagtacctgatggccgagatccagcggggcaccctgctgcccaagcaggtgaacaaggacaacggggtcatcccccaccagctccacctggaggagctgcggatgatcctggccaacgtgaagaagtacctggagttcctgaacgacaaggacgactccgggttcaccgtgagcgagaagatcgagaagatcttcgccttccggatcccctactacgtggggcccctgaacgcccaccacaagtccctgggccactgctggatcgtgcggaacaagggcatggagaaccagaaggtgctgccctggaacttcgacgagatcgtgaacctggaggccagcgccaccgccttcatccgcaagatgaccagcaagtgcacctacgtgatcggcgccgacgtggtgcccaagaactccctggtgtacagcgagtttatggtgctgaacgagctgaacaacgtgaaggtgaacggggagctgctgcccgtcgagctgaaggagaaggtgttcgaggaggtgttcaagcgggtgaagcgggtgaccgggaagcggctgcgcgacttcctgatcgccgagggggccttcaagaagggcgacgagctgtccgggttcgaccagaacttcaagggctccctcaccgcctacctggacttcaagcgcatcctgggggagaagaagatccccaaggaggccatcgaggagatgatccaggccatcgtgctgttcggcgacgaccgcaagctgctgaagcggcgggtggagaagcggtacggcgagctgctctccaaggaggagatcgccgccatctgcaagctgaagtacaccggctggggccggctgagccgggagttcctggaggagatctacgtggtgaaccacaagaccggggagatgatcaacatcatctccatgatgcacgggaccaacgccaacctgatgcagctgctgagcagcgagtaccggttcaccgaggccctggaggcctacaacgaggagcggcagaccgaccactccgacatcgcctacgggatcgtgaaggacctgtacgtgagccccgccgtgcggcggtccatctggcagtccctgaagatcgtgaaggagatcgccaagatcaagaaggccgcccccaagaaggtgttcgtggaggtggcccgggagaacgccgagaagaagcggaccgtgtcccggaagaacgcgctgatcgccctgtacaagaactgcaaggaggaggagcgcgactggatcgccgagctcgacgccaagaccgaccacgagctgcggcgggaccggctgtacctgtactacacccagatgggccggtgcatgtacaccggcaagcccatcgacctgaaccggctgttcgacaccaacgtgtacgacgtggaccacatcttcccccagtccaagatcaaggacgacagcctgtccaaccgggtgctggtggagcggaaggtgaacgccaagaagtccgacgtgtaccccctgcccgaggagatccggaacaagaaccggggcttctggacaatgctgcaccgcaaggagctgatctccaagcggaagtacgaccggctcacccgggtgacccccttcagcgactccgagctggccgacttcatcgcccgccagctggtggagacacgccagagcaccaaggccgtggcccaggtgctgaagaaggtgttccccgacaccgacgtggtgtacgtgaaggccgggaacgtgtcccggttcaggtacgacttcaagatgatcaaggtgcgggaggtgaacgactaccaccacgccaaggacgcctacctgaacatcgtggtgggcaacgtgtacgacaccaagttcaccaagagccccctgaacttcatccaggggaaggacgggaagaactactccctgaaccagatgttcaactacgacgtggagcggtccggcgtgatcgcctggaaggccggcgagaagggcaccatcaccaccgtgaagcggatgatgaagaagaacaacatccagttcacccgccacgccttcgaggtgaagggcgggctgttcgaccagaccatcatgaagaagggcaagggccaggtgcccatcaagagctccgacgtgcacctgagcgacatcagcaagtacggcggctacaacaaggccgccggcgcctacttcttcctggtggagcacaccgtgaagaagaagcgcatccgcaccctggagttcgccccggtgtacctggccaagaagctggagaaccggtccgccctgctggagtactgcaagaacgagctgaacctgctggagagcaggatcctgctgcccaaggtgaagatcaacacgatgttcgagatcgacggcttcaagatgcacatctccggccggaccggcaagaaggtcatcttcaagggcgccgagcagctgtgcatctccgagcagtacggcctggacatcaagaagatcaacaagtacatccagcggtgcaagctggcccgggagaacctgcccgtgaccgccttcgacggcatcagcacccacaacaacgacgtgctgtacagcgtgatgatgcagaagctgaaggacaccgtgtacggcatccacctgtccagccagctgaagaacctggagaagggcaaggaggtgttcgggaagctgtccctgaaggagcagtgcgaggtgctgatggaggccctgaacctgttcagctgcaacagcctgagcgccaacttcaagctgatcaacagcggggcctcctgcggcaccctgaagctgtccaacaacttcagcaaccgcaagtccttcatcctgtacaaccagtccatcaccgggctgttcgagcagaaggtggacctgctgcggctg

SEQ ID NO: 189 - DNA, 4038 bp, synthetic construct
  source 1..4038: mol_type = other DNA
atgtccatcgccgagaagaacaacagcgagtactacctcggcctggacatcggcaccgacagcgtgggctgggccgtgaccgacctggactacaacatccagaagttcaacggcaaggccatgtggggcatccgcctgttcgaggccggcaagacggccgccgagcggcgggtgttccgcaccacccggcgccgcatccagcggcgcaagcaccgcatcgagctgctgcaggagctgttcgacagcgagatctccaaggccgacaccaacttctacctgcggctgaaggagagcaagtactgggtggaggaccgcacgctggggcagaccaacatcctgttcaacgaccccgagtacaccgacaaggactactacaagcagtaccccaccatctaccacctgcggaaggagctgatgaccagcgacgagccgcacgacgtgcggctcgtctacctggccatccaccacctgatcaagaaccggggccacttcctgttcgagggggagggccggaaggacgtcagctccttcaaggtgatcttccgggagctgtgccagtccatgcacgacgagatggagatcgtgctggaggccgccgacctggacgaggtggaggcggtgctgaagaaccgggagtacgggatcaccgacaagaaaacccggctgaacaagctcctgaccatcgacgacgagcacaagaaggagcagaagtccatcatcgccctgctggccgggggcaagaccaaggtggacgccctgttcggggagaaaacctccgaggacagcgacgtgaaggacatcaccttcgccggggacaagttcgaggagagcttcgacgccctgagcatcatgctcggggacaagatgttctgcctcgagaagatgaaggccatctacgactggtccatcctggaggagatcctccagggcgaggactacctgtcctacgccaaggtggccacctacgagaagcacaagaacgacctggccaccctgaagaagatcatgaagaagtaccggtccgacgagtacgacgcctgcttcaaggaccccggcaagaaggacaactactgcgcctacgtggggatggccaagaagggcaagaagaagctggtgctggagaagaagtgctcccaggaggacctgtgcaagtacctgggcaaggtgttcaaggacgtgaagcagaacgaccccgacctgcagtacctgatggccgagatccagcggggcaccctgctgcccaagcaggtgaacaaggacaacggggtcatcccccaccagctccacctggaggagctgcggatgatcctggccaacgtgaagaagtacctggagttcctgaacgacaaggacgactccgggttcaccgtgagcgagaagatcgagaagatcttcgccttccggatcccctactacgtggggcccctgaacgcccaccacaagtccctgggccactgctggatcgtgcggaacaagggcatggagaaccagaaggtgctgccctggaacttcgacgagatcgtgaacctggaggccagcgccaccgccttcatccgcaagatgaccagcaagtgcacctacgtgatcggcgccgacgtggtgcccaagaactccctggtgtacagcgagtttatggtgctgaacgagctgaacaacgtgaaggtgaacggggagctgctgcccgtcgagctgaaggagaaggtgttcgaggaggtgttcaagcgggtgaagcgggtgaccgggaagcggctgcgcgacttcctgatcgccgagggggccttcaagaagggcgacgagctgtccgggttcgaccagaacttcaagggctccctcaccgcctacctggacttcaagcgcatcctgggggagaagaagatccccaaggaggccatcgaggagatgatccaggccatcgtgctgttcggcgacgaccgcaagctgctgaagcggcgggtggagaagcggtacggcgagctgctctccaaggaggagatcgccgccatctgcaagctgaagtacaccggctggggccggctgagccgggagttcctggaggagatctacgtggtgaaccacaagaccggggagatgatcaacatcatctccatgatgcacgggaccaacgccaacctgatgcagctgctgagcagcgagtaccggttcaccgaggccctggaggcctacaacgaggagcggcagaccgaccactccgacatcgcctacgggatcgtgaaggacctgtacgtgagccccgccgtgcggcggtccatctggcagtccctgaagatcgtgaaggagatcgccaagatcaagaaggccgcccccaagaaggtgttcgtggaggtggcccgggagaacgccgagaagaagcggaccgtgtcccggaagaacgcgctgatcgccctgtacaagaactgcaaggaggaggagcgcgactggatcgccgagctcgacgccaagaccgaccacgagctgcggcgggaccggctgtacctgtactacacccagatgggccggtgcatgtacaccggcaagcccatcgacctgaaccggctgttcgacaccaacgtgtacgacgtggaccacatcttcccccagtccaagatcaaggacgacagcctgtccaaccgggtgctggtggagcggaaggtgaacgccaagaagtccgacgtgtaccccctgcccgaggagatccggaacaagaaccggggcttctggacaatgctgcaccgcaaggagctgatctccaagcggaagtacgaccggctcacccgggtgacccccttcagcgactccgagctggccgacttcatcgcccgccagctggtggagacacgccagagcaccaaggccgtggcccaggtgctgaagaaggtgttccccgacaccgacgtggtgtacgtgaaggccgggaacgtgtcccggttcaggtacgacttcaagatgatcaaggtgcgggaggtgaacgactaccaccacgccaaggacgcctacctgaacatcgtggtgggcaacgtgtacgacaccaagttcaccaagagccccctgaacttcatccaggggaaggacgggaagaactactccctgaaccagatgttcaactacgacgtggagcggtccggcgtgatcgcctggaaggccggcgagaagggcaccatcaccaccgtgaagcggatgatgaagaagaacaacatccagttcacccgccacgccttcgaggtgaagggcgggctgttcgaccagaccatcatgaagaagggcaagggccaggtgcccatcaagagctccgacgtgcacctgagcgacatcagcaagtacggcggctacaacaaggccgccggcgcctacttcttcctggtggagcacaccgtgaagaagaagcgcatccgcaccctggagttcgccccggtgtacctggccaagaagctggagaaccggtccgccctgctggagtactgcaagaacgagctgaacctgctggagagcaggatcctgctgcccaaggtgaagatcaacacgatgttcgagatcgacggcttcaagatgcacatctccggccggaccggcaaggtcgtcatcttcaagggcgccgagcagctgtgcatctccgagcagtacggcctggacatcaagaagatcaacaagtacatccagcggtgcaagctggcccgggagaacctgcccgtgaccgccttcgacggcatcagcacccacaacaacgacgtgctgtacagcgtgatgatgcagaagctgaaggacaccgtgtacggcatccacctgtccagccagctgaagaacctggagaagggcaaggaggtgttcgggaagctgtccctgaaggagcagtgcgaggtgctgatggaggccctgaacctgttcagctgcaacagcctgagcgccaacttcaagctgatcaacagcggggcctcctgcggcaccctgaagctgtccaacaacttcagcaaccgcaagtccttcatcctgtacaaccagtccatcaccgggctgttcgagcagaaggtggacctgctgcggctg

SEQ ID NO: 190 - DNA, 4038 bp, synthetic construct
  source 1..4038: mol_type = other DNA
atgtccatcgccgagaagaacaacagcgagtactacctcggcctggacatcggcaccgacagcgtgggctgggccgtgaccgacctggactacaacatccagaagttcaacggcaaggccatgtggggcatccgcctgttcgaggccggcaagacggccgccgagcggcgggtgttccgcaccacccggcgccgcatccagcggcgcaagcaccgcatcgagctgctgcaggagctgttcgacagcgagatctccaaggccgacaccaacttctacctgcggctgaaggagagcaagtactgggtggaggaccgcacgctggggcagaccaacatcctgttcaacgaccccgagtacaccgacaaggactactacaagcagtaccccaccatctaccacctgcggaaggagctgatgaccagcgacgagccgcacgacgtgcggctcgtctacctggccatccaccacctgatcaagaaccggggccacttcctgttcgagggggagggccggaaggacgtcagctccttcaaggtgatcttccgggagctgtgccagtccatgcacgacgagatggagatcgtgctggaggccgccgacctggacgaggtggaggcggtgctgaagaaccgggagtacgggatcaccgacaagaaaacccggctgaacaagctcctgaccatcgacgacgagcacaagaaggagcagaagtccatcatcgccctgctggccgggggcaagaccaaggtggacgccctgttcggggagaaaacctccgaggacagcgacgtgaaggacatcaccttcgccggggacaagttcgaggagagcttcgacgccctgagcatcatgctcggggacaagatgttctgcctcgagaagatgaaggccatctacgactggtccatcctggaggagatcctccagggcgaggactacctgtcctacgccaaggtggccacctacgagaagcacaagaacgacctggccaccctgaagaagatcatgaagaagtaccggtccgacgagtacgacgcctgcttcaaggaccccggcaagaaggacaactactgcgcctacgtggggatggccaagaagggcaagaagaagctggtgctggagaagaagtgctcccaggaggacctgtgcaagtacctgggcaaggtgttcaaggacgtgaagcagaacgaccccgacctgcagtacctgatggccgagatccagcggggcaccctgctgcccaagcaggtgaacaaggacaacggggtcatcccccaccagctccacctggaggagctgcggatgatcctggccaacgtgaagaagtacctggagttcctgaacgacaaggacgactccgggttcaccgtgagcgagaagatcgagaagatcttcgccttccggatcccctactacgtggggcccctgaacgcccaccacaagtccctgggccactgctggatcgtgcggaacaagggcatggagaaccagaaggtgctgccctggaacttcgacgagatcgtgaacctggaggccagcgccaccgccttcatccgcaagatgaccagcaagtgcacctacgtgatcggcgccgacgtggtgcccaagaactccctggtgtacagcgagtttatggtgctgaacgagctgaacaacgtgaaggtgaacggggagctgctgcccgtcgagctgaaggagaaggtgttcgaggaggtgttcaagcgggtgaagcgggtgaccgggaagcggctgcgcgacttcctgatcgccgagggggccttcaagaagggcgacgagctgtccgggttcgaccagaacttcaagggctccctcaccgcctacctggacttcaagcgcatcctgggggagaagaagatccccaaggaggccatcgaggagatgatccaggccatcgtgctgttcggcgacgaccgcaagctgctgaagcggcgggtggagaagcggtacggcgagctgctctccaaggaggagatcgccgccatctgcaagctgaagtacaccggctggggccggctgagccgggagttcctggaggagatctacgtggtgaaccacaagaccggggagatgatcaacatcatctccatgatgcacgggaccaacgccaacctgatgcagctgctgagcagcgagtaccggttcaccgaggccctggaggcctacaacgaggagcggcagaccgaccactccgacatcgcctacgggatcgtgaaggacctgtacgtgagccccgccgtgcggcggtccatctggcagtccctgaagatcgtgaaggagatcgccaagatcaagaaggccgcccccaagaaggtgttcgtggaggtggcccgggagaacgccgagaagaagcggaccgtgtcccggaagaacgcgctgatcgccctgtacaagaactgcaaggaggaggagcgcgactggatcgccgagctcgacgccaagaccgaccacgagctgcggcgggaccggctgtacctgtactacacccagatgggccggtgcatgtacaccggcaagcccatcgacctgaaccggctgttcgacaccaacgtgtacgacgtggaccacatcttcccccagtccaagatcaaggacgacagcctgtccaaccgggtgctggtggagcggaaggtgaacgccaagaagtccgacgtgtaccccctgcccgaggagatccggaacaagaaccggggcttctggacaatgctgcaccgcaaggagctgatctccaagcggaagtacgaccggctcacccgggtgacccccttcagcgactccgagctggccgacttcatcgcccgccagctggtggagacacgccagagcaccaaggccgtggcccaggtgctgaagaaggtgttccccgacaccgacgtggtgtacgtgaaggccgggaacgtgtcccggttcaggtacgacttcaagatgatcaaggtgcgggaggtgaacgactaccaccacgccaaggacgcctacctgaacatcgtggtgggcaacgtgtacgacaccaagttcaccaagagccccctgaacttcatccaggggaaggacgggaagaactactccctgaaccagatgttcaactacgacgtggagcggtccggcgtgatcgcctggaaggccggcgagaagggcaccatcaccaccgtgaagcggatgatgaagaagaacaacatccagttcacccgccacgccttcgaggtgaagggcgggctgttcgaccagaccatcatgaagaagggcaagggccaggtgcccatcaagagctccgacgtgcacctgagcgacatcagcaagtacggcggctacaacaaggccgccggcgcctacttcttcctggtggagcacaccgtgaagaagaagcgcatccgcaccctggagttcgccccggtgtacctggccaagaagctggagaaccggtccgccctgctggagtactgcaagaacgagctgaacctgctggagagcaggatcctgctgcccaaggtgaagatcaacacgatgttcgagatcgacggcttcaagatgcacatctccggccggaccggcaagcaggtcatcttcaagggcgccgagcagctgtgcatctccgagcagtacggcctggacatcaagaagatcaacaagtacatccagcggtgcaagctggcccgggagaacctgcccgtgaccgccttcgacggcatcagcacccacaacaacgacgtgctgtacagcgtgatgatgcagaagctgaaggacaccgtgtacggcatccacctgtccagccagctgaagaacctggagaagggcaaggaggtgttcgggaagctgtccctgaaggagcagtgcgaggtgctgatggaggccctgaacctgttcagctgcaacagcagaagcgccaacttcaagctgatcaacagcggggcctcctgcggcaccctgaagctgtccaacaacttcagcaaccgcaagtccttcatcctgtacaaccagtccatcaccgggctgttcgagcagaaggtggacctgctgcggctg

SEQ ID NO: 191 - DNA, 4038 bp, synthetic construct
  source 1..4038: mol_type = other DNA
atgtccatcgccgagaagaacaacagcgagtactacctcggcctggacatcggcaccgacagcgtgggctgggccgtgaccgacctggactacaacatccagaagttcaacggcaaggccatgtggggcatccgcctgttcgaggccggcaagacggccgccgagcggcgggtgttccgcaccacccggcgccgcatccagcggcgcaagcaccgcatcgagctgctgcaggagctgttcgacagcgagatctccaaggccgacaccaacttctacctgcggctgaaggagagcaagtactgggtggaggaccgcacgctggggcagaccaacatcctgttcaacgaccccgagtacaccgacaaggactactacaagcagtaccccaccatctaccacctgcggaaggagctgatgaccagcgacgagccgcacgacgtgcggctcgtctacctggccatccaccacctgatcaagaaccggggccacttcctgttcgagggggagggccggaaggacgtcagctccttcaaggtgatcttccgggagctgtgccagtccatgcacgacgagatggagatcgtgctggaggccgccgacctggacgaggtggaggcggtgctgaagaaccgggagtacgggatcaccgacaagaaaacccggctgaacaagctcctgaccatcgacgacgagcacaagaaggagcagaagtccatcatcgccctgctggccgggggcaagaccaaggtggacgccctgttcggggagaaaacctccgaggacagcgacgtgaaggacatcaccttcgccggggacaagttcgaggagagcttcgacgccctgagcatcatgctcggggacaagatgttctgcctcgagaagatgaaggccatctacgactggtccatcctggaggagatcctccagggcgaggactacctgtcctacgccaaggtggccacctacgagaagcacaagaacgacctggccaccctgaagaagatcatgaagaagtaccggtccgacgagtacgacgcctgcttcaaggaccccggcaagaaggacaactactgcgcctacgtggggatggccaagaagggcaagaagaagctggtgctggagaagaagtgctcccaggaggacctgtgcaagtacctgggcaaggtgttcaaggacgtgaagcagaacgaccccgacctgcagtacctgatggccgagatccagcggggcaccctgctgcccaagcaggtgaacaaggacaacggggtcatcccccaccagctccacctggaggagctgcggatgatcctggccaacgtgaagaagtacctggagttcctgaacgacaaggacgactccgggttcaccgtgagcgagaagatcgagaagatcttcgccttccggatcccctactacgtggggcccctgaacgcccaccacaagtccctgggccactgctggatcgtgcggaacaagggcatggagaaccagaaggtgctgccctggaacttcgacgagatcgtgaacctggaggccagcgccaccgccttcatccgcaagatgaccagcaagtgcacctacgtgatcggcgccgacgtggtgcccaagaactccctggtgtacagcgagtttatggtgctgaacgagctgaacaacgtgaaggtgaacggggagctgctgcccgtcgagctgaaggagaaggtgttcgaggaggtgttcaagcgggtgaagcgggtgaccgggaagcggctgcgcgacttcctgatcgccgagggggccttcaagaagggcgacgagctgtccgggttcgaccagaacttcaagggctccctcaccgcctacctggacttcaagcgcatcctgggggagaagaagatccccaaggaggccatcgaggagatgatccaggccatcgtgctgttcggcgacgaccgcaagctgctgaagcggcgggtggagaagcggtacggcgagctgctctccaaggaggagatcgccgccatctgcaagctgaagtacaccggctggggccggctgagccgggagttcctggaggagatctacgtggtgaaccacaagaccggggagatgatcaacatcatctccatgatgcacgggaccaacgccaacctgatgcagctgctgagcagcgagtaccggttcaccgaggccctggaggcctacaacgaggagcggcagaccgaccactccgacatcgcctacgggatcgtgaaggacctgtacgtgagccccgccgtgcggcggtccatctggcagtccctgaagatcgtgaaggagatcgccaagatcaagaaggccgcccccaagaaggtgttcgtggaggtggcccgggagaacgccgagaagaagcggaccgtgtcccggaagaacgcgctgatcgccctgtacaagaactgcaaggaggaggagcgcgactggatcgccgagctcgacgccaagaccgaccacgagctgcggcgggaccggctgtacctgtactacacccagatgggccggtgcatgtacaccggcaagcccatcgacctgaaccggctgttcgacaccaacgtgtacgacgtggaccacatcttcccccagtccaagatcaaggacgacagcctgtccaaccgggtgctggtggagcggaaggtgaacgccaagaagtccgacgtgtaccccctgcccgaggagatccggaacaagaaccggggcttctggacaatgctgcaccgcaaggagctgatctccaagcggaagtacgaccggctcacccgggtgacccccttcagcgactccgagctggccgacttcatcgcccgccagctggtggagacacgccagagcaccaaggccgtggcccaggtgctgaagaaggtgttccccgacaccgacgtggtgtacgtgaaggccgggaacgtgtcccggttcaggtacgacttcaagatgatcaaggtgcgggaggtgaacgactaccaccacgccaaggacgcctacctgaacatcgtggtgggcaacgtgtacgacaccaagttcaccaagagccccctgaacttcatccaggggaaggacgggaagaactactccctgaaccagatgttcaactacgacgtggagcggtccggcgtgatcgcctggaaggccggcgagaagggcaccatcaccaccgtgaagcggatgatgaagaagaacaacatccagttcacccgccacgccttcgaggtgaagggcgggctgttcgaccagaccatcatgaagaagggcaagggccaggtgcccatcaagagctccgacgtgcacctgagcgacatcagcaagtacggcggctacaacaaggccagaggcgcctacttcttcctggtggagcacaccgtgaagaagaagcgcatccgcaccctggagttcgccccggtgtacctggccaagaagctggagaaccggtccgccctgctggagtactgcaagaacgagctgaacctgctggagagcaggatcctgctgcccaaggtgaagatcaacacgatgttcgagatcgacggcttcaagatgcacatctccggccggaccggcaagcaggtcatcttcaagggcgccgagcagctgtgcatctccgagcagtacggcctggacatcaagaagatcaacaagtacatccagcggtgcaagctggcccgggagaacctgcccgtgaccgccttcgacggcatcagcacccacaacaacgacgtgctgtacagcgtgatgatgcagaagctgaaggacaccgtgtacggcatccacctgtccagccagctgaagaacctggagaagggcaaggaggtgttcgggaagctgtccctgaaggagcagtgcgaggtgctgatggaggccctgaacctgttcagctgcaacagcctgagcgccaacttcaagctgatcaacagcggggcctcctgcggcaccctgcagctgtccaacaacttcagcaaccgcaagtccttcatcctgtacaaccagtccatcaccgggctgttcgagcagaaggtggacctgctgcggctg

SEQ ID NO: 192 - DNA, 4038 bp, synthetic construct
  source 1..4038: mol_type = other DNA
atgtccatcgccgagaagaacaacagcgagtactacctcggcctggacatcggcaccgacagcgtgggctgggccgtgaccgacctggactacaacatccagaagttcaacggcaaggccatgtggggcatccgcctgttcgaggccggcaagacggccgccgagcggcgggtgttccgcaccacccggcgccgcatccagcggcgcaagcaccgcatcgagctgctgcaggagctgttcgacagcgagatctccaaggccgacaccaacttctacctgcggctgaaggagagcaagtactgggtggaggaccgcacgctggggcagaccaacatcctgttcaacgaccccgagtacaccgacaaggactactacaagcagtaccccaccatctaccacctgcggaaggagctgatgaccagcgacgagccgcacgacgtgcggctcgtctacctggccatccaccacctgatcaagaaccggggccacttcctgttcgagggggagggccggaaggacgtcagctccttcaaggtgatcttccgggagctgtgccagtccatgcacgacgagatggagatcgtgctggaggccgccgacctggacgaggtggaggcggtgctgaagaaccgggagtacgggatcaccgacaagaaaacccggctgaacaagctcctgaccatcgacgacgagcacaagaaggagcagaagtccatcatcgccctgctggccgggggcaagaccaaggtggacgccctgttcggggagaaaacctccgaggacagcgacgtgaaggacatcaccttcgccggggacaagttcgaggagagcttcgacgccctgagcatcatgctcggggacaagatgttctgcctcgagaagatgaaggccatctacgactggtccatcctggaggagatcctccagggcgaggactacctgtcctacgccaaggtggccacctacgagaagcacaagaacgacctggccaccctgaagaagatcatgaagaagtaccggtccgacgagtacgacgcctgcttcaaggaccccggcaagaaggacaactactgcgcctacgtggggatggccaagaagggcaagaagaagctggtgctggagaagaagtgctcccaggaggacctgtgcaagtacctgggcaaggtgttcaaggacgtgaagcagaacgaccccgacctgcagtacctgatggccgagatccagcggggcaccctgctgcccaagcaggtgaacaaggacaacggggtcatcccccaccagctccacctggaggagctgcggatgatcctggccaacgtgaagaagtacctggagttcctgaacgacaaggacgactccgggttcaccgtgagcgagaagatcgagaagatcttcgccttccggatcccctactacgtggggcccctgaacgcccaccacaagtccctgggccactgctggatcgtgcggaacaagggcatggagaaccagaaggtgctgccctggaacttcgacgagatcgtgaacctggaggccagcgccaccgccttcatccgcaagatgaccagcaagtgcacctacgtgatcggcgccgacgtggtgcccaagaactccctggtgtacagcgagtttatggtgctgaacgagctgaacaacgtgaaggtgaacggggagctgctgcccgtcgagctgaaggagaaggtgttcgaggaggtgttcaagcgggtgaagcgggtgaccgggaagcggctgcgcgacttcctgatcgccgagggggccttcaagaagggcgacgagctgtccgggttcgaccagaacttcaagggctccctcaccgcctacctggacttcaagcgcatcctgggggagaagaagatccccaaggaggccatcgaggagatgatccaggccatcgtgctgttcggcgacgaccgcaagctgctgaagcggcgggtggagaagcggtacggcgagctgctctccaaggaggagatcgccgccatctgcaagctgaagtacaccggctggggccggctgagccgggagttcctggaggagatctacgtggtgaaccacaagaccggggagatgatcaacatcatctccatgatgcacgggaccaacgccaacctgatgcagctgctgagcagcgagtaccggttcaccgaggccctggaggcctacaacgaggagcggcagaccgaccactccgacatcgcctacgggatcgtgaaggacctgtacgtgagccccgccgtgcggcggtccatctggcagtccctgaagatcgtgaaggagatcgccaagatcaagaaggccgcccccaagaaggtgttcgtggaggtggcccgggagaacgccgagaagaagcggaccgtgtcccggaagaacgcgctgatcgccctgtacaagaactgcaaggaggaggagcgcgactggatcgccgagctcgacgccaagaccgaccacgagctgcggcgggaccggctgtacctgtactacacccagatgggccggtgcatgtacaccggcaagcccatcgacctgaaccggctgttcgacaccaacgtgtacgacgtggaccacatcttcccccagtccaagatcaaggacgacagcctgtccaaccgggtgctggtggagcggaaggtgaacgccaagaagtccgacgtgtaccccctgcccgaggagatccggaacaagaaccggggcttctggacaatgctgcaccgcaaggagctgatctccaagcggaagtacgaccggctcacccgggtgacccccttcagcgactccgagctggccgacttcatcgcccgccagctggtggagacacgccagagcaccaaggccgtggcccaggtgctgaagaaggtgttccccgacaccgacgtggtgtacgtgaaggccgggaacgtgtcccggttcaggtacgacttcaagatgatcaaggtgcgggaggtgaacgactaccaccacgccaaggacgcctacctgaacatcgtggtgggcaacgtgtacgacaccaagttcaccaagagccccctgaacttcatccaggggaaggacgggaagaactactccctgaaccagatgttcaactacgacgtggagcggtccggcgtgatcgcctggaaggccggcgagaagggcaccatcaccaccgtgaagcggatgatgaagaagaacaacatccagttcacccgccacgccttcgaggtgaagggcgggctgttcgaccagaccatcatgaagaagggcaagggccaggtgcccatcaagagctccgacgtgcacctgagcgacatcagcaagtacggcggctacaacaaggccgccggcgcctacttcttcctggtggagcacaccgtgaagaagaagcgcatccgcaccctggagttcgccccggtgtacctggccaagaagctggagaaccggtccgccctgctggagtactgcaagaacgagctgaacctgctggagagcaggatcctgctgcccaaggtgaagatcaacacgatgttcgagatcgacggcttcaagatgcacatctccggccggaccggcaagcaggtcatcttcaagggcgccgagcagctgtgcatctccgagcagtacggcctggacatcaagaagatcaacaagtacatccagcggtgcaagctggcccgggagaacctgcccgtgaccgccttcgacggcatcagcacccacaacaacgacgtgctgtacagcgtgatgatgcagaagctgaaggacaccgtgtacggcatccacctgtccagccagctgaagaacctggagaagggcaaggaggtgttcgggaagctgtccctgaaggagcagtgcgaggtgctgatggaggccctgaacctgttcagctgcaacagcagaagcgccaacttcaagctgatcaacagcggggcctcctgcggcaccctgcagctgtccaacaacttcagcaaccgcaagtccttcatcctgtacaaccagtccatcaccgggctgttcgagcagaaggtggacctgctgcggctg

SEQ ID NO: 193 - DNA, 4038 bp, synthetic construct
  source 1..4038: mol_type = other DNA
atgtccatcgccgagaagaacaacagcgagtactacctcggcctggacatcggcaccgacagcgtgggctgggccgtgaccgacctggactacaacatccagaagttcaacggcaaggccatgtggggcatccgcctgttcgaggccggcaagacggccgccgagcggcgggtgttccgcaccacccggcgccgcatccagcggcgcaagcaccgcatcgagctgctgcaggagctgttcgacagcgagatctccaaggccgacaccaacttctacctgcggctgaaggagagcaagtactgggtggaggaccgcacgctggggcagaccaacatcctgttcaacgaccccgagtacaccgacaaggactactacaagcagtaccccaccatctaccacctgcggaaggagctgatgaccagcgacgagccgcacgacgtgcggctcgtctacctggccatccaccacctgatcaagaaccggggccacttcctgttcgagggggagggccggaaggacgtcagctccttcaaggtgatcttccgggagctgtgccagtccatgcacgacgagatggagatcgtgctggaggccgccgacctggacgaggtggaggcggtgctgaagaaccgggagtacgggatcaccgacaagaaaacccggctgaacaagctcctgaccatcgacgacgagcacaagaaggagcagaagtccatcatcgccctgctggccgggggcaagaccaaggtggacgccctgttcggggagaaaacctccgaggacagcgacgtgaaggacatcaccttcgccggggacaagttcgaggagagcttcgacgccctgagcatcatgctcggggacaagatgttctgcctcgagaagatgaaggccatctacgactggtccatcctggaggagatcctccagggcgaggactacctgtcctacgccaaggtggccacctacgagaagcacaagaacgacctggccaccctgaagaagatcatgaagaagtaccggtccgacgagtacgacgcctgcttcaaggaccccggcaagaaggacaactactgcgcctacgtggggatggccaagaagggcaagaagaagctggtgctggagaagaagtgctcccaggaggacctgtgcaagtacctgggcaaggtgttcaaggacgtgaagcagaacgaccccgacctgcagtacctgatggccgagatccagcggggcaccctgctgcccaagcaggtgaacaaggacaacggggtcatcccccaccagctccacctggaggagctgcggatgatcctggccaacgtgaagaagtacctggagttcctgaacgacaaggacgactccgggttcaccgtgagcgagaagatcgagaagatcttcgccttccggatcccctactacgtggggcccctgaacgcccaccacaagtccctgggccactgctggatcgtgcggaacaagggcatggagaaccagaaggtgctgccctggaacttcgacgagatcgtgaacctggaggccagcgccaccgccttcatccgcaagatgaccagcaagtgcacctacgtgatcggcgccgacgtggtgcccaagaactccctggtgtacagcgagtttatggtgctgaacgagctgaacaacgtgaaggtgaacggggagctgctgcccgtcgagctgaaggagaaggtgttcgaggaggtgttcaagcgggtgaagcgggtgaccgggaagcggctgcgcgacttcctgatcgccgagggggccttcaagaagggcgacgagctgtccgggttcgaccagaacttcaagggctccctcaccgcctacctggacttcaagcgcatcctgggggagaagaagatccccaaggaggccatcgaggagatgatccaggccatcgtgctgttcggcgacgaccgcaagctgctgaagcggcgggtggagaagcggtacggcgagctgctctccaaggaggagatcgccgccatctgcaagctgaagtacaccggctggggccggctgagccgggagttcctggaggagatctacgtggtgaaccacaagaccggggagatgatcaacatcatctccatgatgcacgggaccaacgccaacctgatgcagctgctgagcagcgagtaccggttcaccgaggccctggaggcctacaacgaggagcggcagaccgaccactccgacatcgcctacgggatcgtgaaggacctgtacgtgagccccgccgtgcggcggtccatctggcagtccctgaagatcgtgaaggagatcgccaagatcaagaaggccgcccccaagaaggtgttcgtggaggtggcccgggagaacgccgagaagaagcggaccgtgtcccggaagaacgcgctgatcgccctgtacaagaactgcaaggaggaggagcgcgactggatcgccgagctcgacgccaagaccgaccacgagctgcggcgggaccggctgtacctgtactacacccagatgggccggtgcatgtacaccggcaagcccatcgacctgaaccggctgttcgacaccaacgtgtacgacgtggaccacatcttcccccagtccaagatcaaggacgacagcctgtccaaccgggtgctggtggagcggaaggtgaacgccaagaagtccgacgtgtaccccctgcccgaggagatccggaacaagaaccggggcttctggacaatgctgcaccgcaaggagctgatctccaagcggaagtacgaccggctcacccgggtgacccccttcagcgactccgagctggccgacttcatcgcccgccagctggtggagacacgccagagcaccaaggccgtggcccaggtgctgaagaaggtgttccccgacaccgacgtggtgtacgtgaaggccgggaacgtgtcccggttcaggtacgacttcaagatgatcaaggtgcgggaggtgaacgactaccaccacgccaaggacgcctacctgaacatcgtggtgggcaacgtgtacgacaccaagttcaccaagagccccctgaacttcatccaggggaaggacgggaagaactactccctgaaccagatgttcaactacgacgtggagcggtccggcgtgatcgcctggaaggccggcgagaagggcaccatcaccaccgtgaagcggatgatgaagaagaacaacatccagttcacccgccacgccttcgaggtgaagggcgggctgttcgaccagaccatcatgaagaagggcaagggccaggtgcccatcaagagctccgacgtgcacctgagcgacatcagcaagtacggcggctacaacaaggccagaggcgcctacttcttcctggtggagcacaccgtgaagaagaagcgcatccgcaccctggagttcgccccggtgtacctggccaagaagctggagaaccggtccgccctgctggagtactgcaagaacgagctgaacctgctggagagcaggatcctgctgcccaaggtgaagatcaacacgatgttcgagatcgacggcttcaagatgcacatctccggccggaccggcaagcaggtcatcttcaagggcgccgagcagctgtgcatctccgagcagtacggcctggacatcaagaagatcaacaagtacatccagcggtgcaagctggcccgggagaacctgcccgtgaccgccttcgacggcatcagcacccacaacaacgacgtgctgtacagcgtgatgatgcagaagctgaaggacaccgtgtacggcatccacctgtccagccagctgaagaacctggagaagggcaaggaggtgttcgggaagctgtccctgaaggagcagtgcgaggtgctgatggaggccctgaacctgttcagctgcaacagcctgagcgccaacttcaagctgatcaacagcggggcctcctgcggcaccctgactctgtccaacaacttcagcaaccgcaagtccttcatcctgtacaaccagtccatcaccgggctgttcgagcagaaggtggacctgctgcggctg

SEQ ID NO: 194 - DNA, 4038 bp, synthetic construct
  source 1..4038: mol_type = other DNA
atgtccatcgccgagaagaacaacagcgagtactacctcggcctggacatcggcaccgacagcgtgggctgggccgtgaccgacctggactacaacatccagaagttcaacggcaaggccatgtggggcatccgcctgttcgaggccggcaagacggccgccgagcggcgggtgttccgcaccacccggcgccgcatccagcggcgcaagcaccgcatcgagctgctgcaggagctgttcgacagcgagatctccaaggccgacaccaacttctacctgcggctgaaggagagcaagtactgggtggaggaccgcacgctggggcagaccaacatcctgttcaacgaccccgagtacaccgacaaggactactacaagcagtaccccaccatctaccacctgcggaaggagctgatgaccagcgacgagccgcacgacgtgcggctcgtctacctggccatccaccacctgatcaagaaccggggccacttcctgttcgagggggagggccggaaggacgtcagctccttcaaggtgatcttccgggagctgtgccagtccatgcacgacgagatggagatcgtgctggaggccgccgacctggacgaggtggaggcggtgctgaagaaccgggagtacgggatcaccgacaagaaaacccggctgaacaagctcctgaccatcgacgacgagcacaagaaggagcagaagtccatcatcgccctgctggccgggggcaagaccaaggtggacgccctgttcggggagaaaacctccgaggacagcgacgtgaaggacatcaccttcgccggggacaagttcgaggagagcttcgacgccctgagcatcatgctcggggacaagatgttctgcctcgagaagatgaaggccatctacgactggtccatcctggaggagatcctccagggcgaggactacctgtcctacgccaaggtggccacctacgagaagcacaagaacgacctggccaccctgaagaagatcatgaagaagtaccggtccgacgagtacgacgcctgcttcaaggaccccggcaagaaggacaactactgcgcctacgtggggatggccaagaagggcaagaagaagctggtgctggagaagaagtgctcccaggaggacctgtgcaagtacctgggcaaggtgttcaaggacgtgaagcagaacgaccccgacctgcagtacctgatggccgagatccagcggggcaccctgctgcccaagcaggtgaacaaggacaacggggtcatcccccaccagctccacctggaggagctgcggatgatcctggccaacgtgaagaagtacctggagttcctgaacgacaaggacgactccgggttcaccgtgagcgagaagatcgagaagatcttcgccttccggatcccctactacgtggggcccctgaacgcccaccacaagtccctgggccactgctggatcgtgcggaacaagggcatggagaaccagaaggtgctgccctggaacttcgacgagatcgtgaacctggaggccagcgccaccgccttcatccgcaagatgaccagcaagtgcacctacgtgatcggcgccgacgtggtgcccaagaactccctggtgtacagcgagtttatggtgctgaacgagctgaacaacgtgaaggtgaacggggagctgctgcccgtcgagctgaaggagaaggtgttcgaggaggtgttcaagcgggtgaagcgggtgaccgggaagcggctgcgcgacttcctgatcgccgagggggccttcaagaagggcgacgagctgtccgggttcgaccagaacttcaagggctccctcaccgcctacctggacttcaagcgcatcctgggggagaagaagatccccaaggaggccatcgaggagatgatccaggccatcgtgctgttcggcgacgaccgcaagctgctgaagcggcgggtggagaagcggtacggcgagctgctctccaaggaggagatcgccgccatctgcaagctgaagtacaccggctggggccggctgagccgggagttcctggaggagatctacgtggtgaaccacaagaccggggagatgatcaacatcatctccatgatgcacgggaccaacgccaacctgatgcagctgctgagcagcgagtaccggttcaccgaggccctggaggcctacaacgaggagcggcagaccgaccactccgacatcgcctacgggatcgtgaaggacctgtacgtgagccccgccgtgcggcggtccatctggcagtccctgaagatcgtgaaggagatcgccaagatcaagaaggccgcccccaagaaggtgttcgtggaggtggcccgggagaacgccgagaagaagcggaccgtgtcccggaagaacgcgctgatcgccctgtacaagaactgcaaggaggaggagcgcgactggatcgccgagctcgacgccaagaccgaccacgagctgcggcgggaccggctgtacctgtactacacccagatgggccggtgcatgtacaccggcaagcccatcgacctgaaccggctgttcgacaccaacgtgtacgacgtggaccacatcttcccccagtccaagatcaaggacgacagcctgtccaaccgggtgctggtggagcggaaggtgaacgccaagaagtccgacgtgtaccccctgcccgaggagatccggaacaagaaccggggcttctggacaatgctgcaccgcaaggagctgatctccaagcggaagtacgaccggctcacccgggtgacccccttcagcgactccgagctggccgacttcatcgcccgccagctggtggagacacgccagagcaccaaggccgtggcccaggtgctgaagaaggtgttccccgacaccgacgtggtgtacgtgaaggccgggaacgtgtcccggttcaggtacgacttcaagatgatcaaggtgcgggaggtgaacgactaccaccacgccaaggacgcctacctgaacatcgtggtgggcaacgtgtacgacaccaagttcaccaagagccccctgaacttcatccaggggaaggacgggaagaactactccctgaaccagatgttcaactacgacgtggagcggtccggcgtgatcgcctggaaggccggcgagaagggcaccatcaccaccgtgaagcggatgatgaagaagaacaacatccagttcacccgccacgccttcgaggtgaagggcgggctgttcgaccagaccatcatgaagaagggcaagggccaggtgcccatcaagagctccgacgtgcacctgagcgacatcagcaagtacggcggctacaacaaggccagaggcgcctacttcttcctggtggagcacaccgtgaagaagaagcgcatccgcaccctggagttcgccccggtgtacctggccaagaagctggagaaccggtccgccctgctggagtactgcaagaacgagctgaacctgctggagagcaggatcctgctgcccaaggtgaagatcaacacgatgttcgagatcgacggcttcaagatgcacatctccggccggaccggcaagcaggtcatcttcaagggcgccgagcagctgtgcatctccgagcagtacggcctggacatcaagaagatcaacaagtacatccagcggtgcaagctggcccgggagaacctgcccgtgaccgccttcgacggcatcagcacccacaacaacgacgtgctgtacagcgtgatgatgcagaagctgaaggacaccgtgtacggcatccacctgtccagccagctgaagaacctggagaagggcaaggaggtgttcgggaagctgtccctgaaggagcagtgcgaggtgctgatggaggccctgaacctgttcagctgcaacagcagaagcgccaacttcaagctgatcaacagcggggcctcctgcggcaccctgcagctgtccaacaacttcagcaaccgcaagtccttcatcctgtacaaccagtccatcaccgggctgttcgagcagaaggtggacctgctgcggctg

SEQ ID NO: 195 - DNA, 4038 bp, synthetic construct
  source 1..4038: mol_type = other DNA
atgtccatcgccgagaagaacaacagcgagtactacctcggcctggacatcggcaccgacagcgtgggctgggccgtgaccgacctggactacaacatccagaagttcaacggcaaggccatgtggggcatccgcctgttcgaggccggcaagacggccgccgagcggcgggtgttccgcaccacccggcgccgcatccagcggcgcaagcaccgcatcgagctgctgcaggagctgttcgacagcgagatctccaaggccgacaccaacttctacctgcggctgaaggagagcaagtactgggtggaggaccgcacgctggggcagaccaacatcctgttcaacgaccccgagtacaccgacaaggactactacaagcagtaccccaccatctaccacctgcggaaggagctgatgaccagcgacgagccgcacgacgtgcggctcgtctacctggccatccaccacctgatcaagaaccggggccacttcctgttcgagggggagggccggaaggacgtcagctccttcaaggtgatcttccgggagctgtgccagtccatgcacgacgagatggagatcgtgctggaggccgccgacctggacgaggtggaggcggtgctgaagaaccgggagtacgggatcaccgacaagaaaacccggctgaacaagctcctgaccatcgacgacgagcacaagaaggagcagaagtccatcatcgccctgctggccgggggcaagaccaaggtggacgccctgttcggggagaaaacctccgaggacagcgacgtgaaggacatcaccttcgccggggacaagttcgaggagagcttcgacgccctgagcatcatgctcggggacaagatgttctgcctcgagaagatgaaggccatctacgactggtccatcctggaggagatcctccagggcgaggactacctgtcctacgccaaggtggccacctacgagaagcacaagaacgacctggccaccctgaagaagatcatgaagaagtaccggtccgacgagtacgacgcctgcttcaaggaccccggcaagaaggacaactactgcgcctacgtggggatggccaagaagggcaagaagaagctggtgctggagaagaagtgctcccaggaggacctgtgcaagtacctgggcaaggtgttcaaggacgtgaagcagaacgaccccgacctgcagtacctgatggccgagatccagcggggcaccctgctgcccaagcaggtgaacaaggacaacggggtcatcccccaccagctccacctggaggagctgcggatgatcctggccaacgtgaagaagtacctggagttcctgaacgacaaggacgactccgggttcaccgtgagcgagaagatcgagaagatcttcgccttccggatcccctactacgtggggcccctgaacgcccaccacaagtccctgggccactgctggatcgtgcggaacaagggcatggagaaccagaaggtgctgccctggaacttcgacgagatcgtgaacctggaggccagcgccaccgccttcatccgcaagatgaccagcaagtgcacctacgtgatcggcgccgacgtggtgcccaagaactccctggtgtacagcgagtttatggtgctgaacgagctgaacaacgtgaaggtgaacggggagctgctgcccgtcgagctgaaggagaaggtgttcgaggaggtgttcaagcgggtgaagcgggtgaccgggaagcggctgcgcgacttcctgatcgccgagggggccttcaagaagggcgacgagctgtccgggttcgaccagaacttcaagggctccctcaccgcctacctggacttcaagcgcatcctgggggagaagaagatccccaaggaggccatcgaggagatgatccaggccatcgtgctgttcggcgacgaccgcaagctgctgaagcggcgggtggagaagcggtacggcgagctgctctccaaggaggagatcgccgccatctgcaagctgaagtacaccggctggggccggctgagccgggagttcctggaggagatctacgtggtgaaccacaagaccggggagatgatcaacatcatctccatgatgcacgggaccaacgccaacctgatgcagctgctgagcagcgagtaccggttcaccgaggccctggaggcctacaacgaggagcggcagaccgaccactccgacatcgcctacgggatcgtgaaggacctgtacgtgagccccgccgtgcggcggtccatctggcagtccctgaagatcgtgaaggagatcgccaagatcaagaaggccgcccccaagaaggtgttcgtggaggtggcccgggagaacgccgagaagaagcggaccgtgtcccggaagaacgcgctgatcgccctgtacaagaactgcaaggaggaggagcgcgactggatcgccgagctcgacgccaagaccgaccacgagctgcggcgggaccggctgtacctgtactacacccagatgggccggtgcatgtacaccggcaagcccatcgacctgaaccggctgttcgacaccaacgtgtacgacgtggaccacatcttcccccagtccaagatcaaggacgacagcctgtccaaccgggtgctggtggagcggaaggtgaacgccaagaagtccgacgtgtaccccctgcccgaggagatccggaacaagaaccggggcttctggacaatgctgcaccgcaaggagctgatctccaagcggaagtacgaccggctcacccgggtgacccccttcagcgactccgagctggccgacttcatcgcccgccagctggtggagacacgccagagcaccaaggccgtggcccaggtgctgaagaaggtgttccccgacaccgacgtggtgtacgtgaaggccgggaacgtgtcccggttcaggtacgacttcaagatgatcaaggtgcgggaggtgaacgactaccaccacgccaaggacgcctacctgaacatcgtggtgggcaacgtgtacgacaccaagttcaccaagagccccctgaacttcatccaggggaaggacgggaagaactactccctgaaccagatgttcaactacgacgtggagcggtccggcgtgatcgcctggaaggccggcgagaagggcaccatcaccaccgtgaagcggatgatgaagaagaacaacatccagttcacccgccacgccttcgaggtgaagggcgggctgttcgaccagaccatcatgaagaagggcaagggccaggtgcccatcaagagctccgacgtgcacctgagcgacatcagcaagtacggcggctacaacaaggccagaggcgcctacttcttcctggtggagcacaccgtgaagaagaagcgcatccgcaccctggagttcgccccggtgtacctggccaagaagctggagaaccggtccgccctgctggagtactgcaagaacgagctgaacctgctggagagcaggatcctgctgcccaaggtgaagatcaacacgatgttcgagatcgacggcttcaagatgcacatctccggccggaccggcaagcaggtcatcttcaagggcgccgagcagctgtgcatctccgagcagtacggcctggacatcaagaagatcaacaagtacatccagcggtgcaagctggcccgggagaacctgcccgtgaccgccttcgacggcatcagcacccacaacaacgacgtgctgtacagcgtgatgatgcagaagctgaaggacaccgtgtacggcatccacctgtccagccagctgaagaacctggagaagggcaaggaggtgttcgggaagctgtccctgaaggagcagtgcgaggtgctgatggaggccctgaacctgttcagctgcaacagcagaagcgccaacttcaagctgatcaacagcggggcctcctgcggcaccctgactctgtccaacaacttcagcaaccgcaagtccttcatcctgtacaaccagtccatcaccgggctgttcgagcagaaggtggacctgctgcggctg

SEQ ID NO: 196-200 - skipped (5 entries)

SEQ ID NO: 201 - RNA, 102 nt, synthetic construct
  source 1..102: mol_type = other RNA
atgcatttactttgcagtactaatttgaagcaattctcaataaggatttagttccgttgtgaaaacattaggttgccctcgtcctttatcgggggctatttt

SEQ ID NO: 202 - RNA, 109 nt, synthetic construct
  source 1..109: mol_type = other RNA
gtttcaaatatgtttcataactttgtgcccagatactgattatgtcagctattcacaataaggattattccgttgtgaaaacatccagggcggggcgactcgccctttt

SEQ ID NO: 203 - RNA, 89 nt, synthetic construct
  source 1..89: mol_type = other RNA
ttgcagcagataattcatcatcatcaaatcacaataaggctatatgccgaaggatgaattcctactgcccctcttctggaggggctttt

SEQ ID NO: 204 - RNA, 80 nt, synthetic construct
  source 1..80: mol_type = other RNA
ataattcatcatcatcaaatcacaataaggctatatgccgaaggatgaattcctactgcccctcttctggaggggctttt

SEQ ID NO: 205 - RNA, 123 nt, synthetic construct
  source 1..123: mol_type = other RNA
tgtttgtgtttgataattaattgacacgctcttgcataagcgtactgacaataaaataacggatttatcagcgtgcgttgtttaattaaatctaaattaaacgtaaatttattgttgcgtttt

SEQ ID NO: 206 - RNA, 92 nt, synthetic construct
  source 1..92: mol_type = other RNA
cttagcaacttagaaagcgtgttctctctgttaacaagttgtagaacacaaaatagataaccccgctacggcggggttatctattttgacac

SEQ ID NO: 207 - RNA, 85 nt, synthetic construct
  source 1..85: mol_type = other RNA
ttctagcactctggaaaagtcgggctttccgttaacaaggaaatatccacgaaatgcgaaggccacccacgggtggccttctttt

SEQ ID NO: 208 - RNA, 90 nt, synthetic construct
  source 1..90: mol_type = other RNA
ttctagcactctggaaaagtcgggctttccgttaacaaggaaatatccacgaaatgcgaaggccacccacgggtggccttcttttatttt

SEQ ID NO: 209 - RNA, 97 nt, synthetic construct
  source 1..97: mol_type = other RNA
gtatttctgatttacaattttgaagcaaatcacagtaaggattattccgttgtgaaaacattcaagtcgccctcgtcttacaatacgggggcatttt

SEQ ID NO: 210 - RNA, 97 nt, synthetic construct
  source 1..97: mol_type = other RNA
attgtaaactatctcagtctgtgagcttttcgtaacaagagtaaaagttcgcaggcactgctctacggagcaacctggccgtctttgacggccactt

SEQ ID NO: 211 - RNA, 84 nt, synthetic construct
  source 1..84: mol_type = other RNA
attgcagcaatccggggtgagagccgttgttacaataaagcaaaatgctgtacccaaagggtccgacatcgtcgggcccttttt

SEQ ID NO: 212 - RNA, 96 nt, synthetic construct
  source 1..96: mol_type = other RNA
tttatatatttaccaaacaattgaaagcaattcacaataaggattattccgttgtgaaaacatttaaagcgggacgagttacatcgtctcgttttt

SEQ ID NO: 213 - RNA, 114 nt, synthetic construct
  source 1..114: mol_type = other RNA
tgggtaccatctaagacaacacgacgcgttcaaatacggctttgccaaaatcgtcggcttgtccgacctcacagtgtgtgaacgagagcttgcttttgcaggctctttcgtttt

SEQ ID NO: 214 - RNA, 84 nt, synthetic construct
  source 1..84: mol_type = other RNA
ttctagcagaagaagcgtcgtggtctttcccgcgataaggtgaaacatccacgatgttgaggcgggctgcggcccgcctcccct

SEQ ID NO: 215 - RNA, 74 nt, synthetic construct
  source 1..74: mol_type = other RNA
tcatcttaacaagaatcagcggttatctcttataagacgttagtcgcaaaatgcctcctttatagggggctctt

SEQ ID NO: 216 - RNA, 139 nt, synthetic construct
  source 1..139: mol_type = other RNA
tagtgatcgtgacgggcgcttgaggggcaaccgttaacaaggcgtaaggcccgtgttgcgggcttgagccaccaaatgcatgtccgtcctacggggcggcatccagatcatagccgtcatcctgcggggtggcggtttt

SEQ ID NO: 217 - RNA, 87 nt, synthetic construct
  source 1..87: mol_type = other RNA
aatagaaaactctattttacatcttatcacaataaggctatatgccgaaggattttatcctatactcccgcttcggtgggagttctt

SEQ ID NO: 218 - RNA, 105 nt, synthetic construct
  source 1..105: mol_type = other RNA
agtgtaatcgacttcagcctgggaacttttcgtaacaaagatgaaaaattcgcaggctacgctccacggagcgtccggccgttttgctttgcagggcggccttct

SEQ ID NO: 219 - RNA, 124 nt, synthetic construct
  source 1..124: mol_type = other RNA
tattactcacgtcttttatggaatcaagacaaagttggtaacgcaagcctcagaccactgcccgctatgcaggcacgtcggcgtaagaaagcgtttgttaaagccctgcttcggcagggctttt

SEQ ID NO: 220 - RNA, 128 nt, synthetic construct
  source 1..128: mol_type = other RNA
ggcttttgtccgatgggagatcgggggccagccgttaacaagctgaggggcgcttccccctgagggcagcactccaagatgcacaaaatgagggagcaggctacggcctgctccttgcgcgtctgcct

SEQ ID NO: 221 - RNA, 110 nt, synthetic construct
  source 1..110: mol_type = other RNA
caaattgtataactcctttataaattgtaaatttatatgattaataattcaagtcttgcaaaactcaagagccggtatgtacaacaaggaaaaacaaaccatatttaatt

SEQ ID NO: 222 - RNA, 92 nt, synthetic construct
  source 1..92: mol_type = other RNA
attatagcaacacaaggaatgtggtcgttaatagcctgttaacaaggtaattagaccacaagatttgtaaggccgggttcgcccggcctttt

SEQ ID NO: 223 - RNA, 128 nt, synthetic construct
  source 1..128: mol_type = other RNA
agtgtaaataatcttggcctgtttcttttcataataaaagaaaagttgcaggtagctccgctttaaaagttggggcctgttctacggaacatacctgacgcgcaatctgcaaagagggcgcgtctttt

SEQ ID NO: 224 - RNA, 93 nt, synthetic construct
  source 1..93: mol_type = other RNA
ttgtgatagataaatattccaaattttatcttatcacaataaggctatatgccgaaggaatatttcctatactcccgcttcggtgggagtttt

SEQ ID NO: 225 - RNA, 124 nt, synthetic construct
  source 1..124: mol_type = other RNA
aaagaagaaaatacgttgaagaaaacattgcagccaccgaagtggtactgtctgccgacgatgtgaaacagcttgatgaggcagctcccatagggttcacccatggattgcgttatcctgaacc

SEQ ID NO: 226 - RNA, 103 nt, synthetic construct
  source 1..103: mol_type = other RNA
gtatcaaagcgacgattacttgctttccacagtaaggatttttcgtccgcaagtcaacattctatgaatgttctcgacgccttcctttatgaaggcgtctttt

SEQ ID NO: 227 - RNA, 82 nt, synthetic construct
  source 1..82: mol_type = other RNA
attatagccgatgggagatcggggagtccgttaacaagcccttatggcacaaaatgaggaggcgggctacggcccgcctttt

SEQ ID NO: 228 - RNA, 115 nt, synthetic construct
  source 1..115: mol_type = other RNA
attagcttagccgcttggagaccggggaccacccgttaacaagccccaatgagggcgaaaaataagtcgggccgggcaggaaactcctgacccggcccgcgcttgagagcgtttt

SEQ ID NO: 229 - RNA, 102 nt, synthetic construct
  source 1..102: mol_type = other RNA
tgtatctgaactgaacctgctcgttttctacaacaaaattccagcaggatatgtctttatcaagacagccttgacgcctcctcacgggggcgtattcatttt

SEQ ID NO: 230 - RNA, 98 nt, synthetic construct
  source 1..98: mol_type = other RNA
tgtatctgaactgaacctgctcgttttctacaacaaaattccagcaggatatgtctttatcaagacagccttgacgcctcctcacgggggcgtattca

SEQ ID NO: 231 - RNA, 124 nt, synthetic construct
  source 1..124: mol_type = other RNA
gttccggatgccgggttcattgtccgggctgcttttcctgggaggcgccacattaagctatgtcgttgccatactgtgccaatttcaggcgctggccgtcattcccgcggcaaaagccgctttt

SEQ ID NO: 232 - RNA, 112 nt, synthetic construct
  source 1..112: mol_type = other RNA
ttgctagtcacctaaagcgacactgcgagtcaaaataaaggctcagccctaaccgccagagatggcctcatttagatgagaatagaagtcccctgcaaggggatttcttcgt

SEQ ID NO: 233 - RNA, 114 nt, synthetic construct
  source 1..114: mol_type = other RNA
tgcaagaaagcgtctatgtaaagatggttaccagcattcccaacgcagagtatgcgctccagcgtataaagagaaatcgtcccaaggaggggctgattcaagttctgcgtgtta

SEQ ID NO: 234 - RNA, 77 nt, synthetic construct
  source 1..77: mol_type = other RNA
cttattagaatcttatcacaataaggccatagtgccgaaggaaaaaattcctatactcctgcttcggtgggagtttt

SEQ ID NO: 235 - RNA, 88 nt, synthetic construct
  source 1..88: mol_type = other RNA
agcttagatcatctggacttgggccaactctcgttaacaaggctcaggtcaaaaaattggaaggctcggttcgccgagcctttcttct

SEQ ID NO: 236 - RNA, 93 nt, synthetic construct
  source 1..93: mol_type = other RNA
tcaattatatttgacatacaatttgaagcaactcacaataaggattattccgttgtgaaaacatttatagcggccctcccgggtcgttatttt

SEQ ID NO: 237 - RNA, 85 nt, synthetic construct
  source 1..85: mol_type = other RNA
attatagccgaagggagatcggggagataccgttaataagcgcctatggcacaagatgagggcgggctacggcctgccctctact

SEQ ID NO: 238 - RNA, 116 nt, synthetic construct
  source 1..116: mol_type = other RNA
ttataaccgatgggagatcgggggctttcgggctatgtcgctcaggcgacatcccaaccgttaacaagtcctttgtggcacaaaatagagggcgggccacggtctgccctcttcct

SEQ ID NO: 239 - RNA, 125 nt, synthetic construct
  source 1..125: mol_type = other RNA
agtgtaattaatcctagtctgtatacttttcacaataagttgaaaaagacgcaggcgctccgctgttatgtgcgagcaatgttccacggaacaacctcttgcaccttcattttgagggtgctttt

SEQ ID NO: 240 - RNA, 110 nt, synthetic construct
  source 1..110: mol_type = other RNA
acatcactcgaaatactcacaccacgtttcgcaattgaaacggtatgcaatcgattcaatgggtaaatatttgtttcggtaccttgtcgaattgtgaggcgatgagaatt

SEQ ID NO: 241 - RNA, 102 nt, synthetic construct
  source 1..102: mol_type = other RNA
tatagcataaccgtgtcggaagcgttgttatgataatgccgtggaaacacggtacaagaaaagttctacccctttatccttgtgataaaggggtatcttttt

SEQ ID NO: 242 - RNA, 95 nt, synthetic construct
  source 1..95: mol_type = other RNA
tattgcaagtgaaaacttagtattggtgtttcagcctattaataaggtttatattcaccaaaaaattaaaggtaggagttttgctcctacctttt

SEQ ID NO: 243 - RNA, 118 nt, synthetic construct
  source 1..118: mol_type = other RNA
gtagcaaatcgagaagcggtcgattcccttttcgtagcaaatcgatccttcgtgtgggctcggtgtcccaagatcatccaccggcatctcaagcctccgtctccggacggaggctttt

SEQ ID NO: 244 - RNA, 108 nt, synthetic construct
  source 1..108: mol_type = other RNA
actgtacatgatcaaaggcatagagcttttcacagcaaggcttatgccgaaggcaacgcccccttgtggggcgaccttacttttatgggtaaggtgtcgtcttctttc

SEQ ID NO: 245 - RNA, 82 nt, synthetic construct
  source 1..82: mol_type = other RNA
actgtacatgatcaaaggcatagagcttttcacagcaaggcttatgccgaaggcaacgcccccttgtggggcgaccttactt

SEQ ID NO: 246 - RNA, 114 nt, synthetic construct
  source 1..114: mol_type = other RNA
agtgtatccgagcgacgattgccccttatcacagtaagtgggactttcgtcccgcgcagggccatgcgtttacgcaaccctttcaacgcctcagcccatcgggcagggcgtttt

SEQ ID NO: 247 - RNA, 110 nt, synthetic construct
  source 1..110: mol_type = other RNA
gttgtaaccgattggagaacgggggccaaccgttaacaagcatcagcccgccgaaaggtgggctggagtcaccaaatcagggggcgggctacggcctgcccctcgctttt

SEQ ID NO: 248 - RNA, 82 nt, synthetic construct
  source 1..82: mol_type = other RNA
ctgtacctttgtgtcattcaaggaactcacaataaagattattctgttgtgaaaacattcaaggcggggcgactcgcctttt

SEQ ID NO: 249 - RNA, 87 nt, synthetic construct
  source 1..87: mol_type = other RNA
attatatccgatgggagatcggggaggttccgttaacaagccttatggcaacaaatgagggggcaggctacggcctgtcctctactt

SEQ ID NO: 250 - RNA, 78 nt, synthetic construct
  source 1..78: mol_type = other RNA
cttattagaatcttatcacaataaggccttagtgccgaaggaaaaaattcctatactcccgcttatggtgggagtttt

SEQ ID NO: 251 - RNA, 102 nt, synthetic construct
  source 1..102: mol_type = other RNA
agtgtatctgagcgacgtttgtcacaaatcatagtaaggacttacgttcgcgtagggcaacgctcacagagcgacctttaacgcctcccagaggggcgtttt

SEQ ID NO: 252 - RNA, 115 nt, synthetic construct
  source 1..115: mol_type = other RNA
gtgtatctgagcggcgcttgtccgactgattatagtaaggacttttgtcacgaaaggctccgctgaccggattccgatcagcgccctcgaaaaacgcctcgcaagaggcgttttt

SEQ ID NO: 253 - RNA, 88 nt, synthetic construct
  source 1..88: mol_type = other RNA
attttgacccatgggagatcggggagaaaccgttaacaagccttaaggcacaaaattgtgaggcgggctacggctcgcctcctctctt

SEQ ID NO: 254 - RNA, 99 nt, synthetic construct
  source 1..99: mol_type = other RNA
tacctgagcggagattgtcctacaaatcacagtaaggactttcagtccgtgggccctgcactacggtgcaacctgcacgccccccagtggggcgtcttt

SEQ ID NO: 255 - RNA, 124 nt, synthetic construct
  source 1..124: mol_type = other RNA
agtatacctgagcggtgatttccgcgaatcatagtaaggagattcttactatgtaggaatcatcacggagggcaacgttgtttcggcaacgccccattccccctgcctatggcttgggggcttt

SEQ ID NO: 256 - RNA, 86 nt, synthetic construct
  source 1..86: mol_type = other RNA
tttatatttacatcattgaaatcaattcacaataaggctataagccgaagaaaaatcttaagtcctgcgtactccgtgggattttt

SEQ ID NO: 257 - RNA, 118 nt, synthetic construct
  source 1..118: mol_type = other RNA
gtagcaaatcgagaagcggtcggtttccttttcgcagcaaatcgatccttcgtgcgggctcggtgtcccaggatcatccaccggcatctcaagcctccgccccagggcgggggctttt

SEQ ID NO: 258 - RNA, 101 nt, synthetic construct
  source 1..101: mol_type = other RNA
cttcgttcacgtaaaacgattttacatcttatcacaataaggctccggactccggaatgccgaaggtgcaagacctatactcccgcttcggtgggagtttt

SEQ ID NO: 259 - RNA, 119 nt, synthetic construct
  source 1..119: mol_type = other RNA
ttgtaatagattattgaagcaaatcacaataaggattattccgttgtgaaaacatttaagtcgtcctcgtctttcaatacgggggtaaacaaaaggcagggtaacctgccttttgtttt

SEQ ID NO: 260 - RNA, 82 nt, synthetic construct
  source 1..82: mol_type = other RNA
gagtgagaggcatgctcgccgcagcgttgcggtcggagagcgtcatgccgatgtcacgcagcatgtgggcgttcaggcgcga

SEQ ID NO: 261 - RNA, 113 nt, synthetic construct
  source 1..113: mol_type = other RNA
gcagcggtctggtgagtgagggcttcccgttaacaagcgaaagcacaaaatggggcgggctgcggcctgccccttcttgttgctggttctgccaaactggctcgcgagacgga

SEQ ID NO: 262 - RNA, 96 nt, synthetic construct
  source 1..96: mol_type = other RNA
agcacgcaatagttgcagtgttcagaaatcgcagtccagccgttaacaagctgagatatgcaccagataaggcgctcgctccggcgggcgcttttt

SEQ ID NO: 263 - RNA, 102 nt, synthetic construct
  source 1..102: mol_type = other RNA
gtgtaactgaccggtacctgcgttgcctaacacaataagaagctaagcttcgcaggatctccccaagtggggaaccttttagggggcgaaagcctccatttt

SEQ ID NO: 264 - RNA, 134 nt, synthetic construct
  source 1..134: mol_type = other RNA
tgtatccgagcgaccagtcctcccgaacggtcacaaaaaagtcttgtggttcttttgggaactgctcgcgcgcggctctgggcttgccccaacgagcggacgctctcactccctgcgagcatgggcgtcctttt

SEQ ID NO: 265 - RNA, 134 nt, synthetic construct; identical to SEQ ID NO: 264
  source 1..134: mol_type = other RNA

SEQ ID NO: 266 - RNA, 107 nt, synthetic construct
  source 1..107: mol_type = other RNA
gttgcataataattattgaaagaacatacgttcaaataaaaatttattcaaatcgccctatatgggtccacagtgtgtggtaaggcttgctaatgcaggcctatttt

SEQ ID NO: 267 - RNA, 89 nt, synthetic construct
  source 1..89: mol_type = other RNA
gataatatatccataaattatcttatcacaataaggctatatgccgtagttcataaagaactttaaccctgcgtactccgtagggtttt

SEQ ID NO: 268 - RNA, 81 nt, synthetic construct
  source 1..81: mol_type = other RNA
attcttattagaatcttatcacaataaggccttagtgccgaaggaaaaaattcctatactcccgcttatggtgggagtttt

SEQ ID NO: 269 - RNA, 86 nt, synthetic construct
  source 1..86: mol_type = other RNA
atagaaattcaattttacatcttatcacaataaggctatatgccgaaggaaaaaaattcctgtactcccgcctcggtgggagtttt

SEQ ID NO: 270 - RNA, 92 nt, synthetic construct
  source 1..92: mol_type = other RNA
tttcttatttaactttgagtattacatcttatcacaataaggctatatgccgaaggatgttaatcctatactcctgccttggtaggagtttt

SEQ ID NO: 271 - RNA, 82 nt, synthetic construct
  source 1..82: mol_type = other RNA
aatctccaaattttatcttgtcacaataaggccaagtgccgaaggctgatgccttaactcccgcctatccggtgggagtttt

SEQ ID NO: 272 - RNA, 100 nt, synthetic construct
  source 1..100: mol_type = other RNA
tcaattatatttgtcatacaatttgaagcaactcacaataaggattattccgttgtgaaaacatttggattgcctcttgtccattaatcagggggctttt

SEQ ID NO: 273 - RNA, 86 nt, synthetic construct
  source 1..86: mol_type = other RNA
aattatctttgtctttatcaaatcacaataaggctatatgccgaagattaactttatagagcctcagttattactgaggttcattg

SEQ ID NO: 274 - RNA, 85 nt, synthetic construct
  source 1..85: mol_type = other RNA
atagaaaatcaattttacatcttatcacaataaggctatatgccgaaggaaaaaattcctgtactcccgcctcggtgggagtttt

SEQ ID NO: 275 - RNA, 109 nt, synthetic construct
  source 1..109: mol_type = other RNA
ttgactaccatacaagattacaccataagttcaaataaagattttatccaaatcgtcatgtttacatgaccccacagtgtgtggattaaacttgcttcggcaagttttt

SEQ ID NO: 276 - RNA, 91 nt, synthetic construct
  source 1..91: mol_type = other RNA
tgcaagtctaccaatatccatcagcagttctaagataaggcctttgtgccgtagggtatggcggtaacccttaactcaatccgccatttta

SEQ ID NO: 277 - RNA, 89 nt, synthetic construct
  source 1..89: mol_type = other RNA
gattaaataataaattgttttacatcttatcacaataaggctatatgccgaaggtttaaaacctatactcccgcttcggtgggagtttt

SEQ ID NO: 278 - RNA, 112 nt, synthetic construct
  source 1..112: mol_type = other RNA
gtttatataattaatttcgtatatttgcaccgaaagacaaatcacaacaaggctataagccgaagaatccaaggttaaaccttgctgcaccccgcgtactccgtggggtttt

SEQ ID NO: 279 - RNA, 79 nt, synthetic construct
  source 1..79: mol_type = other RNA
ttcaattttgtatcttatcacaataaggctatatgccgaaggaaaaaaattcctatactcccgcttcggtgggagtttt

SEQ ID NO: 280 - RNA, 79 nt, synthetic construct
  source 1..79: mol_type = other RNA
ttcaattttatatcttatcacaataaggctatatgccgaaggaaagatattcctgtactcccgcttcggtgggagtttt

SEQ ID NO: 281 - RNA, 108 nt, synthetic construct; identical to SEQ ID NO: 244
  source 1..108: mol_type = other RNA

SEQ ID NO: 282 - RNA, 82 nt, synthetic construct; identical to SEQ ID NO: 245
  source 1..82: mol_type = other RNA

SEQ ID NO: 283 - RNA, 88 nt, synthetic construct
  source 1..88: mol_type = other RNA
ttgttatatttgagcattacatcttatcacaataaggctatatgccgaaggatgtaaatcctatactcctgcttttggtaggagtttt

SEQ ID NO: 284-300 - skipped (17 entries)

SEQ ID NO: 301 - RNA, 46 nt, synthetic construct
  source 1..46: mol_type = other RNA
gttgtgaattgctttcaaattagtatttatgcataggtagaaacat

SEQ ID NO: 302 - RNA, 47 nt, synthetic construct
  source 1..47: mol_type = other RNA
gttgtatatgatcagtatgagatacgattttgtcagctattcacaac

SEQ ID NO: 303 - RNA, 35 nt, synthetic construct
  source 1..35: mol_type = other RNA
gttgtggtttgatgatgaaagaagattagacacaa

SEQ ID NO: 304 - RNA, 36 nt, synthetic construct
  source 1..36: mol_type = other RNA
gttgtggtttgatgatgatatgagataagaagctat

SEQ ID NO: 305 - RNA, 30 nt, synthetic construct
  source 1..30: mol_type = other RNA
gtcttattcagttaccaaatttaataaata

SEQ ID NO: 306 - RNA, 34 nt, synthetic construct
  source 1..34: mol_type = other RNA
gttgcggatggaatacgttttctaagttgctaag

SEQ ID NO: 307 - RNA, 35 nt, synthetic construct
  source 1..35: mol_type = other RNA
gttgcggttggctcgacttttccagagtgctagaa

SEQ ID NO: 308 - RNA, 35 nt, synthetic construct; identical to SEQ ID NO: 307
  source 1..35: mol_type = other RNA

SEQ ID NO: 309 - RNA, 37 nt, synthetic construct
  source 1..37: mol_type = other RNA
gctgtgatttgctttcaaacttgtatctttgacttac

SEQ ID NO: 310 - RNA, 36 nt, synthetic construct
  source 1..36: mol_type = other RNA
gttgcggattgcttactgactgagatggtttacaat

SEQ ID NO: 311 - RNA, 36 nt, synthetic construct
  source 1..36: mol_type = other RNA
gttgtagctccctctctcaccccggattgctacaat

SEQ ID NO: 312 - RNA, 40 nt, synthetic construct
  source 1..40: mol_type = other RNA
gttgtgaattgctttcaaattgtatctttgagttactgaa

SEQ ID NO: 313 - RNA, 33 nt, synthetic construct
  source 1..33: mol_type = other RNA
gtttgagagtcgtgttgttttagatggtactca

SEQ ID NO: 314 - RNA, 35 nt, synthetic construct
  source 1..35: mol_type = other RNA
gtccgggtttggccgcgaggcttcttctgctagaa

SEQ ID NO: 315 - RNA, 33 nt, synthetic construct
  source 1..33: mol_type = other RNA
gtaggggatgaccactgattcttgttaagatga

SEQ ID NO: 316 - RNA, 32 nt, synthetic construct
  source 1..32: mol_type = other RNA
gttgcggttgcccctcaatctcccgtcggcta

SEQ ID NO: 317 - RNA, 32 nt, synthetic construct
  source 1..32: mol_type = other RNA
gttgtggtttgatgtaaaaagagactgatatt

SEQ ID NO: 318 - RNA, 36 nt, synthetic construct
  source 1..36: mol_type = other RNA
gttgcggattgctcccaagctgaagtcgattacact

SEQ ID NO: 319 - RNA, 35 nt, synthetic construct
  source 1..35: mol_type = other RNA
gctttgccttgattccaattcttagataggcaata

SEQ ID NO: 320 - RNA, 36 nt, synthetic construct
  source 1..36: mol_type = other RNA
gttgcggttggcccccgatctcccatcggttaaact

SEQ ID NO: 321 - RNA, 45 nt, synthetic construct
  source 1..45: mol_type = other RNA
cttgaatttaccaattcatataaacatttgaaagcagttattttg

SEQ ID NO: 322 - RNA, 36 nt, synthetic construct
  source 1..36: mol_type = other RNA
gttacaggttgaccgcatttcttgtattgctataat

SEQ ID NO: 323 - RNA, 36 nt, synthetic construct
  source 1..36: mol_type = other RNA
gttgtggattgacaacaggccaagattatttacact

SEQ ID NO: 324 - RNA, 35 nt, synthetic construct
  source 1..35: mol_type = other RNA
gttgtggtttgataaaatttggaaatacaatacaa

SEQ ID NO: 325 - RNA, 25 nt, synthetic construct
  source 1..25: mol_type = other RNA
gtagtggtgcgtgttcttcttcttt

SEQ ID NO: 326 - RNA, 32 nt, synthetic construct
  source 1..32: mol_type = other RNA
gctgtggtttacagggaagcgtcgctttgtac

SEQ ID NO: 327 - RNA, 36 nt, synthetic construct
  source 1..36: mol_type = other RNA
gttgcggttactccccgatctcccatcggctaaaat

SEQ ID NO: 328 - RNA, 36 nt, synthetic construct
  source 1..36: mol_type = other RNA
gttgcggctggtccccggtctccaagcggctataat

SEQ ID NO: 329 - RNA, 34 nt, synthetic construct
  source 1..34: mol_type = other RNA
attgtagattgcgggcaggttcagttcagataca

SEQ ID NO: 330 - RNA, 33 nt, synthetic construct
  source 1..33: mol_type = other RNA
ttgtagattgcgggcaggttcagttcagataca

SEQ ID NO: 331 - RNA, 37 nt, synthetic construct
  source 1..37: mol_type = other RNA
gcttcaccagtataaccgaagacccagcaactgaaac

SEQ ID NO: 332 - RNA, 34 nt, synthetic construct
  source 1..34: mol_type = other RNA
gttttggtgcagcgtcgttttaggtgactattaa

SEQ ID NO: 333 - RNA, 29 nt, synthetic construct
  source 1..29: mol_type = other RNA
gtttgatagtcatctaaaacgacgctgca

SEQ ID NO: 334 - RNA, 22 nt, synthetic construct
  source 1..22: mol_type = other RNA
gttgtggtttgattctaataag

SEQ ID NO: 335 - RNA, 36 nt, synthetic construct
  source 1..36: mol_type = other RNA
gttgcgggttgaccccaagtccagatgatctaagct

SEQ ID NO: 336 - RNA, 40 nt, synthetic construct
  source 1..40: mol_type = other RNA
gttgtgaattgctttcaaattgtgattttacgatctttga

SEQ ID NO: 337 - RNA, 36 nt, synthetic construct
  source 1..36: mol_type = other RNA
gttgcggtttctccccgatctcccatcggctataat

SEQ ID NO: 338 - RNA, 35 nt, synthetic construct
  source 1..35: mol_type = other RNA
gttgcggtttgcccccgatctcccatcggctataa

SEQ ID NO: 339 - RNA, 36 nt, synthetic construct
  source 1..36: mol_type = other RNA
gttgtggattgacaacaggctaggattgattacact

SEQ ID NO: 340 - RNA, 37 nt, synthetic construct
  source 1..37: mol_type = other RNA
gtttcagttgctgggtaattgattatattggtgaagt

SEQ ID NO: 341 - RNA, 34 nt, synthetic construct
  source 1..34: mol_type = other RNA
gtcatagcttcccttccgacacggctatgctata

SEQ ID NO: 342 - RNA, 37 nt, synthetic construct
  source 1..37: mol_type = other RNA
gttataggttgacaccaatattaagttttcaagaatg

SEQ ID NO: 343 - RNA, 33 nt, synthetic construct
  source 1..33: mol_type = other RNA
gctgcggattgcggccgcttctcgatttgctac

SEQ ID NO: 344 - RNA, 36 nt, synthetic construct
  source 1..36: mol_type = other RNA
gctgtggattgatctatttctttgatggtgtacagt

SEQ ID NO: 345 - RNA, 36 nt, synthetic construct; identical to SEQ ID NO: 344
  source 1..36: mol_type = other RNA

SEQ ID NO: 346 - RNA, 36 nt, synthetic construct
  source 1..36: mol_type = other RNA
gctgtggtttgtagggaatcgtcgctcggatacact

SEQ ID NO: 347 - RNA, 36 nt, synthetic construct
  source 1..36: mol_type = other RNA
gttgcggttggcccccgttctcccatccgctacaat

SEQ ID NO: 348 - RNA, 33 nt, synthetic construct
  source 1..33: mol_type = other RNA
gttgtgatttccttgaataagagtgaaagctag

SEQ ID NO: 349 - RNA, 36 nt, synthetic construct
  source 1..36: mol_type = other RNA
gttgcggttcctccccgatctcccatcggctataat

SEQ ID NO: 350 - RNA, 22 nt, synthetic construct
  source 1..22: mol_type = other RNA
gttgtggtttgattctaataag

SEQ ID NO: 351 - RNA, 36 nt, synthetic construct
  source 1..36: mol_type = other RNA
gctgtggtttgccgggaagcgtcgctcagatacact

SEQ ID NO: 352 - RNA, 35 nt, synthetic construct
  source 1..35: mol_type = other RNA
gctgtggttggtcggaaagccccgctcagatacac

SEQ ID NO: 353 - RNA, 36 nt, synthetic construct
  source 1..36: mol_type = other RNA
gttgcggtttctccccgatctcccatcggttaaaat

SEQ ID NO: 354 - RNA, 32 nt, synthetic construct
  source 1..32: mol_type = other RNA
gctgtggtttgaggggaatctccgctcaggta

SEQ ID NO: 355 - RNA, 36 nt, synthetic construct
  source 1..36: mol_type = other RNA
gctgtggtttgatgggaatccccgctcaggtatact

SEQ ID NO: 356 - RNA, 33 nt, synthetic construct
  source 1..33: mol_type = other RNA
gttgtgaattgatttcaaattagtagttttggg

SEQ ID NO: 357 - RNA, 33 nt, synthetic construct; identical to SEQ ID NO: 343
  source 1..33: mol_type = other RNA

SEQ ID NO: 358 - RNA, 34 nt, synthetic construct
  source 1..34: mol_type = other RNA
gttgtggtttgatgtaaaatcgtgataagaggag

SEQ ID NO: 359 - RNA, 34 nt, synthetic construct
  source 1..34: mol_type = other RNA
gttgtgatttgctttcaataatctatctttacgg

SEQ ID NO: 360 - RNA, 20 nt, synthetic construct
  source 1..20: mol_type = other RNA
gttgcggttggccctcactc

SEQ ID NO: 361 - RNA, 35 nt, synthetic construct
  source 1..35: mol_type = other RNA
gttgcggttggccctcactcaccagaccgctaagc

SEQ ID NO: 362 - RNA, 31 nt, synthetic construct
  source 1..31: mol_type = other RNA
gttgcggttggcctgcgatttctgaactgct

SEQ ID NO: 363 - RNA, 35 nt, synthetic construct
  source 1..35: mol_type = other RNA
gttgtgtttcgcgggcaggtaccggtcagttacat

SEQ ID NO: 364 - RNA, 34 nt, synthetic construct
  source 1..34: mol_type = other RNA
gttgtggctgcggaggaatggtcgctcggataca

SEQ ID NO: 365 - RNA, 33 nt, synthetic construct
  source 1..33: mol_type = other RNA
ttgtggctgcggaggaatggtcgctcggataca

SEQ ID NO: 366 - RNA, 33 nt, synthetic construct
  source 1..33: mol_type = other RNA
gtttgagttgtatgttctttcagtaattacaac

SEQ ID NO: 367 - RNA, 36 nt, synthetic construct
  source 1..36: mol_type = other RNA
gttgtgatttgattaattttatggataaaagatatt

SEQ ID NO: 368 - RNA, 26 nt, synthetic construct
  source 1..26: mol_type = other RNA
gttgtggtttgattctaataagcaat

SEQ ID NO: 369 - RNA, 31 nt, synthetic construct
  source 1..31: mol_type = other RNA
gttgtggtttgatgtaaaattgaaaagatat

SEQ ID NO: 370 - RNA, 35 nt, synthetic construct
  source 1..35: mol_type = other RNA
gttgtggtttgatgtaaattcaagaggataagaaa

SEQ ID NO: 371 - RNA, 27 nt, synthetic construct
  source 1..27: mol_type = other RNA
gttgtggtttgattcaatttggagatt

SEQ ID NO: 372 - RNA, 40 nt, synthetic construct; identical to SEQ ID NO: 336
  source 1..40: mol_type = other RNA

SEQ ID NO: 373 - RNA, 35 nt, synthetic construct
  source 1..35: mol_type = other RNA
gttgtggtttgatgtaaaaagagactgatctgatt

SEQ ID NO: 374 - RNA, 31 nt, synthetic construct
  source 1..31: mol_type = other RNA
gttgtggtttgatgtaaaattgaaaagctat

SEQ ID NO: 375 - RNA, 33 nt, synthetic construct
  source 1..33: mol_type = other RNA
gtttgagaatggtgtaattctgtatgtagtcaa

SEQ ID NO: 376 - RNA, 35 nt, synthetic construct
  source 1..35: mol_type = other RNA
gttttggttctcttatggatattggtagacttgta

SEQ ID NO: 377 - RNA, 36 nt, synthetic construct
  source 1..36: mol_type = other RNA
gttgtggtttgatgtaaaacaaataaagctttcatc

SEQ ID NO: 378 - RNA, 44 nt, synthetic construct
  source 1..44: mol_type = other RNA
gttgtgatttgctttcaaaaaattgtatctttgacttgataaac

SEQ ID NO: 379 - RNA, 24 nt, synthetic construct
  source 1..24: mol_type = other RNA
gttgtggtttgatgcaaaattgaa

SEQ ID NO: 380 - RNA, 24 nt, synthetic construct
  source 1..24: mol_type = other RNA
gttgtggtttgatgtaaaattgaa

SEQ ID NO: 381 - RNA, 36 nt, synthetic construct; identical to SEQ ID NO: 344
  source 1..36: mol_type = other RNA

SEQ ID NO: 382 - RNA, 36 nt, synthetic construct; identical to SEQ ID NO: 344
  source 1..36: mol_type = other RNA

SEQ ID NO: 383 - RNA, 34 nt, synthetic construct
  source 1..34: mol_type = other RNA
gttgtggtttgatgtaatttcaggatcataagaa

SEQ ID NO: 384-400 - skipped (17 entries)

SEQ ID NO: 401 - DNA, 152 bp, synthetic construct
  source 1..152: mol_type = other DNA
gttgtgaattgctttcaaattagtatttatgcataggtagaaacatgaaaatgcatttactttgcagtactaatttgaagcaattctcaataaggatttagttccgttgtgaaaacattaggttgccctcgtcctttatcgggggctatttt

SEQ ID NO: 402 - DNA, 160 bp, synthetic construct
  source 1..160: mol_type = other DNA
gttgtatatgatcagtatgagatacgattttgtcagctattcacaacgaaagtttcaaatatgtttcataactttgtgcccagatactgattatgtcagctattcacaataaggattattccgttgtgaaaacatccagggcggggcgactcgccctttt

SEQ ID NO: 403 - DNA, 128 bp, synthetic construct
  source 1..128: mol_type = other DNA
gttgtggtttgatgatgaaagaagattagacacaagaaattgcagcagataattcatcatcatcaaatcacaataaggctatatgccgaaggatgaattcctactgcccctcttctggaggggctttt

SEQ ID NO: 404 - DNA, 120 bp, synthetic construct
  source 1..120: mol_type = other DNA
gttgtggtttgatgatgatatgagataagaagctatgaaaataattcatcatcatcaaatcacaataaggctatatgccgaaggatgaattcctactgcccctcttctggaggggctttt

SEQ ID NO: 405 - DNA, 157 bp, synthetic construct
  source 1..157: mol_type = other DNA
gtcttattcagttaccaaatttaataaatagaaatgtttgtgtttgataattaattgacacgctcttgcataagcgtactgacaataaaataacggatttatcagcgtgcgttgtttaattaaatctaaattaaacgtaaatttattgttgcgtttt

SEQ ID NO: 406 - DNA, 130 bp, synthetic construct
  source 1..130: mol_type = other DNA
gttgcggatggaatacgttttctaagttgctaaggaaacttagcaacttagaaagcgtgttctctctgttaacaagttgtagaacacaaaatagataaccccgctacggcggggttatctattttgacac

SEQ ID NO: 407 - DNA, 124 bp, synthetic construct
  source 1..124: mol_type = other DNA
gttgcggttggctcgacttttccagagtgctagaagaaattctagcactctggaaaagtcgggctttccgttaacaaggaaatatccacgaaatgcgaaggccacccacgggtggccttctttt

SEQ ID NO: 408 - DNA, 129 bp, synthetic construct
  source 1..129: mol_type = other DNA
gttgcggttggctcgacttttccagagtgctagaagaaattctagcactctggaaaagtcgggctttccgttaacaaggaaatatccacgaaatgcgaaggccacccacgggtggccttcttttatttt

SEQ ID NO: 409 - DNA, 138 bp, synthetic construct
  source 1..138: mol_type = other DNA
gctgtgatttgctttcaaacttgtatctttgacttacgaaagtatttctgatttacaattttgaagcaaatcacagtaaggattattccgttgtgaaaacattcaagtcgccctcgtcttacaatacgggggcatttt

SEQ ID NO: 410 - DNA, 137 bp, synthetic construct
  source 1..137: mol_type = other DNA
gttgcggattgcttactgactgagatggtttacaatgaaaattgtaaactatctcagtctgtgagcttttcgtaacaagagtaaaagttcgcaggcactgctctacggagcaacctggccgtctttgacggccactt

SEQ ID NO: 411 - DNA, 123 bp, synthetic construct
  source 1..123: mol_type = other DNA
gttgtagctccctctctcaccccggattgctacaatgaaaattgcagcaatccggggtgagagccgttgttacaataaagcaaaatgctgtacccaaagggtccgacatcgtcgggccctttt

SEQ ID NO: 412 - DNA, 140 bp, synthetic construct
  source 1..140: mol_type = other DNA
gttgtgaattgctttcaaattgtatctttgagttactgaagaaatttatatatttaccaaacaattgaaagcaattcacaataaggattattccgttgtgaaaacatttaaagcgggacgagttacatcgtctcgttttt

SEQ ID NO: 413 - DNA, 151 bp, synthetic construct
  source 1..151: mol_type = other DNA
gtttgagagtcgtgttgttttagatggtactcagaaatgggtaccatctaagacaacacgacgcgttcaaatacggctttgccaaaatcgtcggcttgtccgacctcacagtgtgtgaacgagagcttgcttttgcaggctctttcgtttt

SEQ ID NO: 414 - DNA, 123 bp, synthetic construct
  source 1..123: mol_type = other DNA
gtccgggtttggccgcgaggcttcttctgctagaagaaattctagcagaagaagcgtcgtggtctttcccgcgataaggtgaaacatccacgatgttgaggcgggctgcggcccgcctcccct

SEQ ID NO: 415 - DNA, 111 bp, synthetic construct
  source 1..111: mol_type = other DNA
gtaggggatgaccactgattcttgttaagatgagaaatcatcttaacaagaatcagcggttatctcttataagacgttagtcgcaaaatgcctcctttatagggggctctt

SEQ ID NO: 416 - DNA, 175 bp, synthetic construct
  source 1..175: mol_type = other DNA
gttgcggttgcccctcaatctcccgtcggctagaaatagtgatcgtgacgggcgcttgaggggcaaccgttaacaaggcgtaaggcccgtgttgcgggcttgagccaccaaatgcatgtccgtcctacggggcggcatccagatcatagccgtcatcctgcggggtggcggtttt

SEQ ID NO: 417 - DNA, 123 bp, synthetic construct
  source 1..123: mol_type = other DNA
gttgtggtttgatgtaaaaagagactgatattgaaaaatagaaaactctattttacatcttatcacaataaggctatatgccgaaggattttatcctatactcccgcttcggtgggagttctt

SEQ ID NO: 418 - DNA, 145 bp, synthetic construct
  source 1..145: mol_type = other DNA
gttgcggattgctcccaagctgaagtcgattacactgaaaagtgtaatcgacttcagcctgggaacttttcgtaacaaagatgaaaaattcgcaggctacgctccacggagcgtccggccgttttgctttgcagggcggccttct

SEQ ID NO: 419 - DNA, 163 bp, synthetic construct
  source 1..163: mol_type = other DNA
gctttgccttgattccaattcttagataggcaatagaaatattactcacgtcttttatggaatcaagacaaagttggtaacgcaagcctcagaccactgcccgctatgcaggcacgtcggcgtaagaaagcgtttgttaaagccctgcttcggcagggctttt

SEQ ID NO: 420 - DNA, 168 bp, synthetic construct
  source 1..168: mol_type = other DNA
gttgcggttggcccccgatctcccatcggttaaactgaaaggcttttgtccgatgggagatcgggggccagccgttaacaagctgaggggcgcttccccctgagggcagcactccaagatgcacaaaatgagggagcaggctacggcctgctccttgcgcgtctgcct

SEQ ID NO: 421 - DNA, 159 bp, synthetic construct
  source 1..159: mol_type = other DNA
cttgaatttaccaattcatataaacatttgaaagcagttattttggaaacaaattgtataactcctttataaattgtaaatttatatgattaataattcaagtcttgcaaaactcaagagccggtatgtacaacaaggaaaaacaaaccatatttaatt

SEQ ID NO: 422 - DNA, 132 bp, synthetic construct
  source 1..132: mol_type = other DNA
gttacaggttgaccgcatttcttgtattgctataatgaaaattatagcaacacaaggaatgtggtcgttaatagcctgttaacaaggtaattagaccacaagatttgtaaggccgggttcgcccggcctttt

SEQ ID NO: 423 - DNA, 168 bp, synthetic construct
  source 1..168: mol_type = other DNA
gttgtggattgacaacaggccaagattatttacactgaaaagtgtaaataatcttggcctgtttcttttcataataaaagaaaagttgcaggtagctccgctttaaaagttggggcctgttctacggaacatacctgacgcgcaatctgcaaagagggcgcgtctttt

SEQ ID NO: 424 - DNA, 132 bp, synthetic construct
  source 1..132: mol_type = other DNA
gttgtggtttgataaaatttggaaatacaatacaagaaattgtgatagataaatattccaaattttatcttatcacaataaggctatatgccgaaggaatatttcctatactcccgcttcggtgggagtttt

SEQ ID NO: 425 - DNA, 153 bp, synthetic construct
  source 1..153: mol_type = other DNA
gtagtggtgcgtgttcttcttctttgaaaaaagaagaaaatacgttgaagaaaacattgcagccaccgaagtggtactgtctgccgacgatgtgaaacagcttgatgaggcagctcccatagggttcacccatggattgcgttatcctgaacc

SEQ ID NO: 426 - DNA, 139 bp, synthetic construct
  source 1..139: mol_type = other DNA
gctgtggtttacagggaagcgtcgctttgtacgaaagtatcaaagcgacgattacttgctttccacagtaaggatttttcgtccgcaagtcaacattctatgaatgttctcgacgccttcctttatgaaggcgtctttt

SEQ ID NO: 427 - DNA, 122 bp, synthetic construct
  source 1..122: mol_type = other DNA
gttgcggttactccccgatctcccatcggctaaaatgaaaattatagccgatgggagatcggggagtccgttaacaagcccttatggcacaaaatgaggaggcgggctacggcccgcctttt

SEQ ID NO: 428 - DNA, 173 bp, synthetic construct
  source 1..173: mol_type = other DNA
gggtcttcgagaagacctgttgcggctggtccccggtctccaagcggctataatgaaaattagcttagccgcttggagaccggggaccacccgttaacaagccccaatgagggcgaaaaataagtcgggccgggcaggaaactcctgacccggcccgcgcttgagagcgtttt

SEQ ID NO: 429 - DNA, 140 bp, synthetic construct
  source 1..140: mol_type = other DNA
attgtagattgcgggcaggttcagttcagatacagaaatgtatctgaactgaacctgctcgttttctacaacaaaattccagcaggatatgtctttatcaagacagccttgacgcctcctcacgggggcgtattcatttt

SEQ ID NO: 430 - DNA, 135 bp, synthetic construct
  source 1..135: mol_type = other DNA
ttgtagattgcgggcaggttcagttcagatacagaaatgtatctgaactgaacctgctcgttttctacaacaaaattccagcaggatatgtctttatcaagacagccttgacgcctcctcacgggggcgtattca

SEQ ID NO: 431 - DNA, 165 bp, synthetic construct
  source 1..165: mol_type = other DNA
gcttcaccagtataaccgaagacccagcaactgaaacgaaagttccggatgccgggttcattgtccgggctgcttttcctgggaggcgccacattaagctatgtcgttgccatactgtgccaatttcaggcgctggccgtcattcccgcggcaaaagccgctttt

SEQ ID NO: 432 - DNA, 150 bp, synthetic construct
  source 1..150: mol_type = other DNA
gttttggtgcagcgtcgttttaggtgactattaagaaattgctagtcacctaaagcgacactgcgagtcaaaataaaggctcagccctaaccgccagagatggcctcatttagatgagaatagaagtcccctgcaaggggatttcttcgt

SEQ ID NO: 433 - DNA, 147 bp, synthetic construct
  source 1..147: mol_type = other DNA
gtttgatagtcatctaaaacgacgctgcagaaatgcaagaaagcgtctatgtaaagatggttaccagcattcccaacgcagagtatgcgctccagcgtataaagagaaatcgtcccaaggaggggctgattcaagttctgcgtgtta

SEQ ID NO: 434 - DNA, 103 bp, synthetic construct
  source 1..103: mol_type = other DNA
gttgtggtttgattctaataaggaaacttattagaatcttatcacaataaggccatagtgccgaaggaaaaaattcctatactcctgcttcggtgggagtttt

SEQ ID NO: 435 - DNA, 128 bp, synthetic construct
  source 1..128: mol_type = other DNA
gttgcgggttgaccccaagtccagatgatctaagctgaaaagcttagatcatctggacttgggccaactctcgttaacaaggctcaggtcaaaaaattggaaggctcggttcgccgagcctttcttct

SEQ ID NO: 436 - DNA, 137 bp, synthetic construct
  source 1..137: mol_type = other DNA
gttgtgaattgctttcaaattgtgattttacgatctttgagaaatcaattatatttgacatacaatttgaagcaactcacaataaggattattccgttgtgaaaacatttatagcggccctcccgggtcgttatttt

SEQ ID NO: 437 - DNA, 125 bp, synthetic construct
  source 1..125: mol_type = other DNA
gttgcggtttctccccgatctcccatcggctataatgaaaattatagccgaagggagatcggggagataccgttaataagcgcctatggcacaagatgagggcgggctacggcctgccctctact

SEQ ID NO: 438 - DNA, 155 bp, synthetic construct
  source 1..155: mol_type = other DNA
gttgcggtttgcccccgatctcccatcggctataagaaattataaccgatgggagatcgggggctttcgggctatgtcgctcaggcgacatcccaaccgttaacaagtcctttgtggcacaaaatagagggcgggccacggtctgccctcttcct

SEQ ID NO: 439 - DNA, 165 bp, synthetic construct
  source 1..165: mol_type = other DNA
gttgtggattgacaacaggctaggattgattacactgaaaagtgtaattaatcctagtctgtatacttttcacaataagttgaaaaagacgcaggcgctccgctgttatgtgcgagcaatgttccacggaacaacctcttgcaccttcattttgagggtgctttt

SEQ ID NO: 440 - DNA, 151 bp, synthetic construct
  source 1..151: mol_type = other DNA
gtttcagttgctgggtaattgattatattggtgaagtgaaaacatcactcgaaatactcacaccacgtttcgcaattgaaacggtatgcaatcgattcaatgggtaaatatttgtttcggtaccttgtcgaattgtgaggcgatgagaatt

SEQ ID NO: 441 - DNA, 140 bp, synthetic construct
  source 1..140: mol_type = other DNA
gtcatagcttcccttccgacacggctatgctatagaaatatagcataaccgtgtcggaagcgttgttatgataatgccgtggaaacacggtacaagaaaagttctacccctttatccttgtgataaaggggtatcttttt

SEQ ID NO: 442 - DNA, 136 bp, synthetic construct
  source 1..136: mol_type = other DNA
gttataggttgacaccaatattaagttttcaagaatgaaaatattgcaagtgaaaacttagtattggtgtttcagcctattaataaggtttatattcaccaaaaaattaaaggtaggagttttgctcctacctttt

SEQ ID NO: 443 - DNA, 155 bp, synthetic construct
  source 1..155: mol_type = other DNA
gctgcggattgcggccgcttctcgatttgctacgaaagtagcaaatcgagaagcggtcgattcccttttcgtagcaaatcgatccttcgtgtgggctcggtgtcccaagatcatccaccggcatctcaagcctccgtctccggacggaggctttt

SEQ ID NO: 444 - DNA, 148 bp, synthetic construct
  source 1..148: mol_type = other DNA
gctgtggattgatctatttctttgatggtgtacagtgaaaactgtacatgatcaaaggcatagagcttttcacagcaaggcttatgccgaaggcaacgcccccttgtggggcgaccttacttttatgggtaaggtgtcgtcttctttc

SEQ ID NO: 445 - DNA, 122 bp, synthetic construct
  source 1..122: mol_type = other DNA
gctgtggattgatctatttctttgatggtgtacagtgaaaactgtacatgatcaaaggcatagagcttttcacagcaaggcttatgccgaaggcaacgcccccttgtggggcgaccttactt

SEQ ID NO: 446 - DNA, 154 bp, synthetic construct
  source 1..154: mol_type = other DNA
gctgtggtttgtagggaatcgtcgctcggatacactgaaaagtgtatccgagcgacgattgccccttatcacagtaagtgggactttcgtcccgcgcagggccatgcgtttacgcaaccctttcaacgcctcagcccatcgggcagggcgtttt

SEQ ID NO: 447 - DNA, 150 bp, synthetic construct
  source 1..150: mol_type = other DNA
gttgcggttggcccccgttctcccatccgctacaatgaaagttgtaaccgattggagaacgggggccaaccgttaacaagcatcagcccgccgaaaggtgggctggagtcaccaaatcagggggcgggctacggcctgcccctcgctttt

SEQ ID NO: 448 - DNA, 119 bp, synthetic construct
  source 1..119: mol_type = other DNA
gttgtgatttccttgaataagagtgaaagctaggaaactgtacctttgtgtcattcaaggaactcacaataaagattattctgttgtgaaaacattcaaggcggggcgactcgcctttt

SEQ ID NO: 449 - DNA, 127 bp, synthetic construct
  source 1..127: mol_type = other DNA
gttgcggttcctccccgatctcccatcggctataatgaaaattatatccgatgggagatcggggaggttccgttaacaagccttatggcaacaaatgagggggcaggctacggcctgtcctctactt

SEQ ID NO: 450 - DNA, 104 bp, synthetic construct
  source 1..104: mol_type = other DNA
gttgtggtttgattctaataaggaaacttattagaatcttatcacaataaggccttagtgccgaaggaaaaaattcctatactcccgcttatggtgggagtttt

SEQ ID NO: 451 - DNA, 142 bp, synthetic construct
  source 1..142: mol_type = other DNA
gctgtggtttgccgggaagcgtcgctcagatacactgaaaagtgtatctgagcgacgtttgtcacaaatcatagtaaggacttacgttcgcgtagggcaacgctcacagagcgacctttaacgcctcccagaggggcgtttt

SEQ ID NO: 452 - DNA, 154 bp, synthetic construct
  source 1..154: mol_type = other DNA
gctgtggttggtcggaaagccccgctcagatacacgaaagtgtatctgagcggcgcttgtccgactgattatagtaaggacttttgtcacgaaaggctccgctgaccggattccgatcagcgccctcgaaaaacgcctcgcaagaggcgttttt

SEQ ID NO: 453 - DNA, 128 bp, synthetic construct
  source 1..128: mol_type = other DNA
gttgcggtttctccccgatctcccatcggttaaaatgaaaattttgacccatgggagatcggggagaaaccgttaacaagccttaaggcacaaaattgtgaggcgggctacggctcgcctcctctctt

SEQ ID NO: 454 - DNA, 135 bp, synthetic construct
  source 1..135: mol_type = other DNA
gctgtggtttgaggggaatctccgctcaggtagaaatacctgagcggagattgtcctacaaatcacagtaaggactttcagtccgtgggccctgcactacggtgcaacctgcacgccccccagtggggcgtcttt

SEQ ID NO: 455 - DNA, 164 bp, synthetic construct
  source 1..164: mol_type = other DNA
gctgtggtttgatgggaatccccgctcaggtatactgaaaagtatacctgagcggtgatttccgcgaatcatagtaaggagattcttactatgtaggaatcatcacggagggcaacgttgtttcggcaacgccccattccccctgcctatggcttgggggcttt

SEQ ID NO: 456 - DNA, 123 bp, synthetic construct
  source 1..123: mol_type = other DNA
gttgtgaattgatttcaaattagtagttttggggaaatttatatttacatcattgaaatcaattcacaataaggctataagccgaagaaaaatcttaagtcctgcgtactccgtgggattttt

SEQ ID NO: 457 - DNA, 155 bp, synthetic construct
  source 1..155: mol_type = other DNA
gctgcggattgcggccgcttctcgatttgctacgaaagtagcaaatcgagaagcggtcggtttccttttcgcagcaaatcgatccttcgtgcgggctcggtgtcccaggatcatccaccggcatctcaagcctccgccccagggcgggggctttt

SEQ ID NO: 458 - DNA, 139 bp, synthetic construct
  source 1..139: mol_type = other DNA
gttgtggtttgatgtaaaatcgtgataagaggaggaaacttcgttcacgtaaaacgattttacatcttatcacaataaggctccggactccggaatgccgaaggtgcaagacctatactcccgcttcggtgggagtttt

SEQ ID NO: 459 - DNA, 157 bp, synthetic construct
  source 1..157: mol_type = other DNA
gttgtgatttgctttcaataatctatctttacgggaaattgtaatagattattgaagcaaatcacaataaggattattccgttgtgaaaacatttaagtcgtcctcgtctttcaatacgggggtaaacaaaaggcagggtaacctgccttttgtttt

SEQ ID NO: 460 - DNA, 106 bp, synthetic construct
  source 1..106: mol_type = other DNA
gttgcggttggccctcactcgaaagagtgagaggcatgctcgccgcagcgttgcggtcggagagcgtcatgccgatgtcacgcagcatgtgggcgttcaggcgcga

SEQ ID NO: 461 - DNA, 152 bp, synthetic construct
  source 1..152: mol_type = other DNA
gttgcggttggccctcactcaccagaccgctaagcgaaagcagcggtctggtgagtgagggcttcccgttaacaagcgaaagcacaaaatggggcgggctgcggcctgccccttcttgttgctggttctgccaaactggctcgcgagacgga

SEQ ID NO: 462 - DNA, 131 bp, synthetic construct
  source 1..131: mol_type = other DNA
gttgcggttggcctgcgatttctgaactgctgaaaagcacgcaatagttgcagtgttcagaaatcgcagtccagccgttaacaagctgagatatgcaccagataaggcgctcgctccggcgggcgcttttt

SEQ ID NO: 463 - DNA, 141 bp, synthetic construct
  source 1..141: mol_type = other DNA
gttgtgtttcgcgggcaggtaccggtcagttacatgaaagtgtaactgaccggtacctgcgttgcctaacacaataagaagctaagcttcgcaggatctccccaagtggggaaccttttagggggcgaaagcctccatttt

SEQ ID NO: 464 - DNA, 172 bp, synthetic construct
  source 1..172: mol_type = other DNA
gttgtggctgcggaggaatggtcgctcggatacagaaatgtatccgagcgaccagtcctcccgaacggtcacaaaaaagtcttgtggttcttttgggaactgctcgcgcgcggctctgggcttgccccaacgagcggacgctctcactccctgcgagcatgggcgtcctttt

SEQ ID NO: 465 - DNA, 171 bp, synthetic construct
  source 1..171: mol_type = other DNA
ttgtggctgcggaggaatggtcgctcggatacagaaatgtatccgagcgaccagtcctcccgaacggtcacaaaaaagtcttgtggttcttttgggaactgctcgcgcgcggctctgggcttgccccaacgagcggacgctctcactccctgcgagcatgggcgtcctttt

SEQ ID NO: 466 - DNA, 144 bp, synthetic construct
  source 1..144: mol_type = other DNA
gtttgagttgtatgttctttcagtaattacaacgaaagttgcataataattattgaaagaacatacgttcaaataaaaatttattcaaatcgccctatatgggtccacagtgtgtggtaaggcttgctaatgcaggcctatttt

SEQ ID NO: 467 - DNA, 129 bp, synthetic construct
  source 1..129: mol_type = other DNA
gttgtgatttgattaattttatggataaaagatattgaaagataatatatccataaattatcttatcacaataaggctatatgccgtagttcataaagaactttaaccctgcgtactccgtagggtttt

SEQ ID NO: 468 - DNA, 111 bp, synthetic construct
  source 1..111: mol_type = other DNA
gttgtggtttgattctaataagcaatgaaaattcttattagaatcttatcacaataaggccttagtgccgaaggaaaaaattcctatactcccgcttatggtgggagtttt

SEQ ID NO: 469 - DNA, 121 bp, synthetic construct
  source 1..121: mol_type = other DNA
gttgtggtttgatgtaaaattgaaaagatatgaaaatagaaattcaattttacatcttatcacaataaggctatatgccgaaggaaaaaaattcctgtactcccgcctcggtgggagtttt

SEQ ID NO: 470 - DNA, 131 bp, synthetic construct
  source 1..131: mol_type = other DNA
gttgtggtttgatgtaaattcaagaggataagaaagaaatttcttatttaactttgagtattacatcttatcacaataaggctatatgccgaaggatgttaatcctatactcctgccttggtaggagtttt

SEQ ID NO: 471 - DNA, 113 bp, synthetic construct
  source 1..113: mol_type = other DNA
gttgtggtttgattcaatttggagattgaaaaatctccaaattttatcttgtcacaataaggccaagtgccgaaggctgatgccttaactcccgcctatccggtgggagtttt

SEQ ID NO: 472 - DNA, 144 bp, synthetic construct
  source 1..144: mol_type = other DNA
gttgtgaattgctttcaaattgtgattttacgatctttgagaaatcaattatatttgtcatacaatttgaagcaactcacaataaggattattccgttgtgaaaacatttggattgcctcttgtccattaatcagggggctttt

SEQ ID NO: 473 - DNA, 125 bp, synthetic construct
  source 1..125: mol_type = other DNA
gttgtggtttgatgtaaaaagagactgatctgattgaaaaattatctttgtctttatcaaatcacaataaggctatatgccgaagattaactttatagagcctcagttattactgaggttcattg

SEQ ID NO: 474 - DNA, 120 bp, synthetic construct
  source 1..120: mol_type = other DNA
gttgtggtttgatgtaaaattgaaaagctatgaaaatagaaaatcaattttacatcttatcacaataaggctatatgccgaaggaaaaaattcctgtactcccgcctcggtgggagtttt

SEQ ID NO: 475 - DNA, 146 bp, synthetic construct
  source 1..146: mol_type = other DNA
gtttgagaatggtgtaattctgtatgtagtcaagaaattgactaccatacaagattacaccataagttcaaataaagattttatccaaatcgtcatgtttacatgaccccacagtgtgtggattaaacttgcttcggcaagttttt

SEQ ID NO: 476 - DNA, 130 bp, synthetic construct
  source 1..130: mol_type = other DNA
gttttggttctcttatggatattggtagacttgtagaaatgcaagtctaccaatatccatcagcagttctaagataaggcctttgtgccgtagggtatggcggtaacccttaactcaatccgccatttta

SEQ ID NO: 477 - DNA, 129 bp, synthetic construct
  source 1..129: mol_type = other DNA
gttgtggtttgatgtaaaacaaataaagctttcatcgaaagattaaataataaattgttttacatcttatcacaataaggctatatgccgaaggtttaaaacctatactcccgcttcggtgggagtttt

SEQ ID NO: 478 - DNA, 160 bp, synthetic construct
  source 1..160: mol_type = other DNA
gttgtgatttgctttcaaaaaattgtatctttgacttgataaacgaaagtttatataattaatttcgtatatttgcaccgaaagacaaatcacaacaaggctataagccgaagaatccaaggttaaaccttgctgcaccccgcgtactccgtggggtttt

SEQ ID NO: 479 - DNA, 107 bp, synthetic construct
  source 1..107: mol_type = other DNA
gttgtggtttgatgcaaaattgaagaaattcaattttgtatcttatcacaataaggctatatgccgaaggaaaaaaattcctatactcccgcttcggtgggagtttt

SEQ ID NO: 480 - DNA, 107 bp, synthetic construct
  source 1..107: mol_type = other DNA
gttgtggtttgatgtaaaattgaagaaattcaattttatatcttatcacaataaggctatatgccgaaggaaagatattcctgtactcccgcttcggtgggagtttt

SEQ ID NO: 481 - DNA, 148 bp, synthetic construct; identical to SEQ ID NO: 444
  source 1..148: mol_type = other DNA

SEQ ID NO: 482 - DNA, 122 bp, synthetic construct; identical to SEQ ID NO: 445
  source 1..122: mol_type = other DNA

SEQ ID NO: 483 - DNA, 126 bp, synthetic construct
  source 1..126: mol_type = other DNA
gttgtggtttgatgtaatttcaggatcataagaagaaattgttatatttgagcattacatcttatcacaataaggctatatgccgaaggatgtaaatcctatactcctgcttttggtaggagtttt

SEQ ID NO: 484-499 - skipped (16 entries)

SEQ ID NO: 500 - RNA, 20 nt, synthetic construct
  source 1..20: mol_type = other RNA
gtgagccactgtgcctggcc

SEQ ID NO: 501 - DNA, 54 bp, synthetic construct
  source 1..54: mol_type = other DNA
  modified_base 1: mod_base = OTHER; note = phosphorylation modification
  modified_base 51..54: mod_base = OTHER; note = phosphorothioate linkage
acttcggtacgcgtcgacgtacggtcgacgagtcgcgcgtacgacgatcgagac

SEQ ID NO: 502 - DNA, 54 bp, synthetic construct
  source 1..54: mol_type = other DNA
  modified_base 1: mod_base = OTHER; note = phosphorylation modification
  modified_base 51..54: mod_base = OTHER; note = phosphorothioate linkage
gtctcgatcgtcgtacgcgcgactcgtcgaccgtacgtcgacgcgtaccgaagt

SEQ ID NO: 503 - DNA, 42 bp, synthetic construct
  source 1..42: mol_type = other DNA
  modified_base 1..4: mod_base = OTHER; note = phosphorothioate linkage
aactacacgacgctcttccgatctnnnwnnnwnnagtgacac

SEQ ID NO: 504 - DNA, 48 bp, synthetic construct
  source 1..48: mol_type = other DNA
  modified_base 48: mod_base = OTHER; note = phosphorylation modification
nnnnnngtgtcactnnwnnnwnnnagatcggaagagcgtcgtgtagtt

SEQ ID NO: 505 - DNA, 18 bp, synthetic construct
  source 1..18: mol_type = other DNA
gtcgacgagtcgcgcgta

SEQ ID NO: 506 - DNA, 18 bp, synthetic construct
  source 1..18: mol_type = other DNA
tcgtcgaccgtacgtcga

SEQ ID NO: 507 - DNA, 52 bp, synthetic construct
  source 1..52: mol_type = other DNA
  modified_base 49..52: mod_base = OTHER; note = phosphorothioate linkage
gtgactggagttcagacgtgtgctcttccgatctcgcgcgtacgacgatcga

SEQ ID NO: 508 - DNA, 54 bp, synthetic construct
  source 1..54: mol_type = other DNA
  modified_base 51..54: mod_base = OTHER; note = phosphorothioate linkage
gtgactggagttcagacgtgtgctcttccgatctatcgcgcgtacgacgatcga

SEQ ID NO: 509 - DNA, 55 bp, synthetic construct
  source 1..55: mol_type = other DNA
  modified_base 52..55: mod_base = OTHER; note = phosphorothioate linkage
gtgactggagttcagacgtgtgctcttccgatcttaacgcgcgtacgacgatcga

SEQ ID NO: 510 - DNA, 52 bp, synthetic construct
  source 1..52: mol_type = other DNA
  modified_base 49..52: mod_base = OTHER; note = phosphorothioate linkage
gtgactggagttcagacgtgtgctcttccgatcttacgtcgacgcgtaccga

SEQ ID NO: 511 - DNA, 54 bp, synthetic construct
  source 1..54: mol_type = other DNA
  modified_base 51..54: mod_base = OTHER; note = phosphorothioate linkage
gtgactggagttcagacgtgtgctcttccgatctgctacgtcgacgcgtaccga

SEQ ID NO: 512 - DNA, 55 bp, synthetic construct
  source 1..55: mol_type = other DNA
  modified_base 52..55: mod_base = OTHER; note = phosphorothioate linkage
gtgactggagttcagacgtgtgctcttccgatctatgtacgtcgacgcgtaccga

SEQ ID NO: 513 - DNA, 70 bp, synthetic construct
  source 1..70: mol_type = other DNA
aatgatacggcgaccaccgagatctacacnnnnnnnnacactctttccctacacgacgctcttccgatct

SEQ ID NO: 514 - DNA, 66 bp, synthetic construct
  source 1..66: mol_type = other DNA
caagcagaagacggcatacgagatnnnnnnnngtgactggagttcagacgtgtgctcttccgatct

SEQ ID NO: 515-520 - skipped (6 entries)

SEQ ID NO: 521 - protein, 1472 aa, synthetic construct
MAPKKKRKVMKRILGLDLGTTSIGWALVNEAEHESEQSSIIKLGVRVNPLTVDESSNFEKGKAVETNQVRRLKRGAHRNLLRYKQRRATLLSILRKNGFITDQTLLSENGANSTYETYNLRAKAVVDKISLEEFARVLLMINKKRGYKSSRKAKSGEDGKLIDGMTIAKRLYDENITPGQLCFQILSEGKKVLPDFYRSDLQQEFDRIWDYQAQFYPEVLTFELKERLVGKNASQTWDTLAQYFVWTEQRKVWNETLAQNEVKDVVFQLTKPNRKVKGVELKKENYEWRHKALSEKMHPENLAIVFQEINADINKSSGYLGAISDRSKNLFFNNITVGQYLMSRLNENRHNSLKNLVFYRQDYMDEFETIWESQARFHSQLTPELKAEIRDVVIFYQRRLKSQKSLISMCEFERQEKEVVCNGKTKTIVVGSRVVPRSSLLFQDFKIWQTLNNVEVIVVDDFGKKKRAKKNIISPSNATEATETLELEGRRRLTQEEKEMLAEELSIKAELKKSQVLNLLFGKTESLDLNFECLKGNTTGHSLYQAFSKMMDLSGHEPLDFKKSTSDLKSQTYAVFKTLGWNCNILDTQIYLDKALDEQTSYKLWHLLYSFEGDNSATGDSKLKEKLTTLCNCPADYVGPLMDIVFEDDYGSLSAKAIRKILPYMKEGCGYDVACTYAGYRHSASSLTKEEIEQKELLDQLELLPKNALRNPVVEKILNQMVNVVNEIINTYGRPDEIRVELARELKKNQKEREQMTKAISVATKQQEQIRELLQKEFGISNPSRNDIIRYRLYEELKANGYKTLYSDIYIPREKLFSKEIDIEHIIPKARLFDDSFSNKTLEYRSVNINKGSQTAYDFVRETYGEEGLKRYLSACTSLFAQQKTKLKKLKMTEAEIPADFIDRDLRNTQYIAKRALSMLHTICRSVVATSGSITEQLRKDWELIDVMKELNWDKYAAIGKVSYHQDRDGRQIGRITDWTKRNDHRHHAMDALTVAFTKPAFVQYFNNKNAAHQEGSELYAIRNSYFQNGRAKAPIPLHAFRAEALRHLEQILVSIKAKNKVVTLNVNKVHKPKGGTYTKVQLTPRGQLHNETIYGSRREYATKEETVGSAFDMEKIATVCKAIYREALLWRLNEFGGDPKKAFTGKNALDKNPIWLNEAHTKAVPSKVKTVSFDTTYTIRKDISPDLNVAKVVDAKIRKLLEARLEAFGGDPKKAFTNLEENPIWLNQAQGICIKRVTIYGVSNAQSLHDKRDKEGRLVLDEQGKTIPVDFVNTSNNHHVAIYQKPVLDKKGNPILDENGEPRMELDERVVSFYEAVARVNQGLPAVDREYKRDEGWKFLYTMKQNEYFVFPNETTGFDPREVDLLDPNNYALISPNLFRVQTMSKVMYGNSTVRDYKFRHHLETTVCDMKELRDLTYKQYKSLQFLRNIIKVRINHIGEIVSVGEYKRPAATKKAGQAKKKKDYKDDDDK

SEQ ID NO: 522 - protein, 1255 aa, synthetic construct
MAPKKKRKVMKKVLGLDLGVGSIGWCLIEKDENNIPVRILRMGSRIVPIDSDEESGFTKGNGKSKNSDRTAKRTARKCYDRYQLRRHALINTLKRLGIEPNNIPEQTPLELWQKRADAASKEISLEELGRVLLHINQKRGYKHSRLSNSNREETVYVQEVNSRYDNLKAEGLTIGQHFALKLKENEQTSEDGKKYYTYRIKEQVYPRHAYEEETKKILEVQKSFHSDILTTDVCKEILNIIFYQRDLKSCKDLVSFCEFESYTIKKDGKEITIGPKVAPKTSPLAQLCSILETANNITIRNRRNDELYILPEQRKALADFLDNNEVLKLTNLYSILNINKKDGWWAGKAIGKGLKGNTTKCEIRKALCNLPTDQIEALTKFELKIDEYVDKETGEVRKRIDNTYAERQPLYRLWHLIYSIKDADELSDALHHLGIEDKETIQKLCNLDFRTAGYANKSAKAIGRILPYLMEGMMYSQACERAGLDHSQRIDPERTLLSSLPQIKKNELRQPVVEKILQQLVNIVNLLLKEEGQIDEIRVELARELKQSKDERNETFRRNNQNERKNKEYAERIKEYGLTPTRNRIMKMKMWVESEHSCMYCGQPVDVKEFLQGADVEREHIIPKGLLFDNSFTNQVCACRSCNSKKGMRTAYDFIESERGEEGLRSFIEHINYLFDKKQISRSKLNRLLVSYKAYQERKAQGKETEEDKNLWENFIDRQLRQSQYIARKAVEILQLVCRNVYSTSGMITDLVRQQWGYNDILHDLNFERYKKAGLTTMVTKLHSGKEVEVERIKDWTKRLDNRHHAVDALAIACTTQSLIQRLNTLNASRDEMLIDLINKDERIIDPERSMLEKWICAQPHITYAQAKEEIDKIIISQRPNTRITVPGKRYIYKNGKRTLAQRGIIVPRGALHAEFVYGRILKQENTQEGIKLSPQYVRKYKLGIGAQGFLFNGKEFYKEELKKDPKTGIVTIVVIDKIKDVLDKIVDGGIRRRILERLNRGFEEGKDYRTNVPQALANLKNLDEEPIYSDDAKTRPILSVRKYVPSTTMVAVRRDGNGRPLAYAEPDGNHHVAFYRNEDGLITEQIVTKWQAVQRKLHDIPIIIDNPTQLWNDILERNDIPDELLQTLPNDKSSLMLSLQIGEALVMGMDETDFKKAIEEKDMRTLADHLYFVQNLSSSNYRLRRHVESSYDITGMNKEDQRFLNIKSIGALINYNPHKVKITVLGDIIPKRPAATKKAGQAKKKKDYKDDDDK

SEQ ID NO: 523 - protein, 1249 aa, synthetic construct
MAPKKKRKVMKKRILGLDTGTNSLGWAVVDREENGQYTLVDKGVVIFQEGVKIEKGIESSRAAERTGHRALRRQYFRRRLRKIKVLKTLVKYNLCPALTEDDLELWKLRKIYPKKDEFMAWQRTNDNEDINPYHCRYICLNEVLDLDRQQDRYTLGRAFYHMAQRRGFLSNRLDQTDEKETGKVKADIKTLSKEIEDSGCKYLGEYFYILYKEKGNTVRIRTRYTDREQHYKKEFFAICEKQKLPKEMVEEVARALFFQRPLKSQRQSVGKCTFEKGKPRCSDSHPLYEEYRMLSFLNSIRIQGPWDVNGYRPLNDEELKRIESLFYRKSKPNFDFEEIAKKIAGKNQYQWKDDTKVNMPYKFNFRMSQGVPGCPTIAQLKEVFGEEWKEGIAETYTLSTKKDGTQKSIDELVNDIWNVLFSFDSKDKVKEFGVKHLQLDEEQAKKFSEIRLSRGYASLSLKAIRNILPFLQMGMIYSDAVFFAKIPTIIGQSLWAERQNVIKEDLAYAIQMAMKEKRRIDEAVKDYLLDNFDLKPGATELLYHPSMIETYPDAKPNKDGIVLLGSPRTNAVKNPMAMRSLHEVRKVVNSLIKEGKIGPDTEVHIEYARELNNANMRTAINDWQKEQERNHNQYAEEISKLYKEATGKDIQPTDLDILKYQLWEEQGHICLYTGKKIGIADFIGAGPMFDIEHTIPQSVGGDSTQENMTLCSSHYNRYVKKAKLPTELAEYESIMTRIEPWKEHFEELSKQIDHISTRGIWDKATKDAKIRKKNRLLLEKKYWQGKYNRFKMTEVPEGFALRQGAGIGIISKYAALYLKSYFHDSLHPERRQVYSIKGALTKEFRTMWGIQLEHEKKSRDNHTHHCIDAIVVACIGKNEISKMGEFFHTEERYKMGEGQRPPQFEKPWPTFTQDLKQITEELLVVHDTPDNMPKRASRKIEISGGRRVVAKGDCARGSLHQDTYYGAIERDGEIKYVVRKPLSSFTNIKDLDNIVDDAVRQTVLNAVEGKDFKKAIAEPIYMNEAKGILIKKVRCYTPTVTQPLDIRRQRDVSRKEYKQQFHVMNDENYMMAIYQGIVKGKRKTKFALVNAMDAAKFYKRSTDRNDYPSLVPEDKDGLPLKWCVRKGTQLIMLEEDEESVSLANEEEMSNRMFTITKMDKVGRLTCRNSKEARTAGDLKSFVNANPFKLKDGYRPILCMSPINFHFLVEGYDFTISPLGEIKLKHKRPAATKKAGQAKKKKDYKDDDDK

SEQ ID NO: 524 - protein, 1240 aa, synthetic construct
MAPKKKRKVMNKKRILGLDTGTNSLGWAIVDQDESGQYTLIDKGVVIFQEGVKIEGPKEFSKAAERTQHRALRRQYFRRRLRKIKVLEALVKYNLCPALTEEDLSLWKLRKIYPKKDEFMQWQRTNDNEDVNPYHYRYICLNEVLNLDRQQDRYTLGRAFYHMAQRRGFLSNRLDVKEEDESGAVKSGIANLSKEIEESGCKYLGEYFYKLYKEKGNTIRIRTRYTDREQHYKKEFFAICDKQHLPEEMIAELARALFFQRPLKSQRQNVGNCTFEKGKPRCSDSHPLYEEFRMLSFLNNIQIQGPWDEVYRPLNEEERQKIDSLFYRKSKPNFDFEEIAKKIAGKGKYQWKGDTQTDLPYKFNFRMSQGVSGCPTIAQLKEVFGDDWKKGIAETYMLGTKKDGMQKSIDEMVNDIWNVLFSFDSKEKVKEFGIKNLQLNEEQAEKFSKIRLSRNYASLSQKAIRNILPFLRMGMIYSDAVFFAKVPAIIGQNLWEARQSEIMEDLSYTIQMAIKEKRHIDEAVKDYLQDNFDLKPGAAGLLYHPSMIETYPDAKPNKDGVVLLGSPRTNAVKNPMAMRSLHEVRKVINNLIKEGKIGPDTEVHIEYARALNNANMRAAINELQREQDRKHKQYAEEIRQLYKEATGKDIQPTETDILKYQLWEEQGHICLYTGDKIGIADFIGASPTYDIEHTIPRSAGGDSTQMNMTLCSSRYNREVKKTKLPTELAEHEFIMTRIEPWKQRIEELRKQIDRDKKGNESDKAARDKRIRRKNLHMEELKYWEGKYDRFTMTEVPEGFARRQGAGIGLISKYAALYLKSYFHDTLHPDRRQVFSIKGTVTSEFRKMWGIQDEYEKKSRDSHTHHCIDAIVIACIGKNEFNMMGKYHHDMYDYNEGNGPKPQFDKPWPTFTQDLKQITEELLVVHDTSDNMPKKASRMIEVNGKKVVAKGDCARGSLHQDTYYGAIEKDGEIKYVVRKSLSTLKESDVENIVDDVVKEKVKQAIAEKGFKDAMAGDIYMNEAKGILIKKVRCKTGVTQPLQIREKKRRDLSRKEYKRPFYVVNDENYMMAIYEGGKMQMVTALDAAKFYKRSADRNDYPTIAPMEYKGRKLKYLVRKGTQILMLEKNEESISTTNPQELFKRLFTIMVLEKDGRLMLRHSSEARPATEVKKLLTYNPFMLNDDTRPILRVSLSKLNFLVEGYDFTITPLGEIKLIHKRPAATKKAGQAKKKKDYKDDDDK

SEQ ID NO: 525 - skipped

SEQ ID NO: 526 - protein, 1098 aa, synthetic construct
MAPKKKRKVMDTPYLLALDLGTSSIGYVAFALDDSDEPKSILDLGVRIFPDGRHPKTKEPLAVSRRIARGIRRNRDRGQNRVRRLVKELIEFGLFPVDERERKKVFDTVSPYYARAAAAQELVDKETLGRAIFHIGRRRGFKSNRLAGESEESEFKEKISELRNKLEGKTLGEYLFEREKQNQALAKDKKAHDQKPFRFRNGETDFYADRQMYLDEFERIKAVQGNIHLNDEQWAALKETAFWQYPLKPVPKGKCRYYPEENRAHIDLPISHDYRIYQEVNSLRYQSQNIEYSLDDRQRKAVYDYLRSHKTMTFKQMLKLKEQKSPLFPSDAQFNLDVASRNGKLMGNKTLVDFMKKELLGAIAEKIDYVALNGIADLLIEPLEEINGKKVVMETEKVALELKKRIPNLSDEQIENLCNYRFKRDTAGVSRKFMEQINPVMRDQGLVYSDAVAQLKDDNGHPFNHTYGNTGEVLQRLPYYGEVMPESVWGAQPEADKNKSPLERDDDAYQYGKIANPTVHVALNQLRVVVNRVIDKLGSVPAKIHAELTRDLKNSKDAREQIEKQQRKNKIKNDEIRRFLVDELGIINPSRRDFQKVKLWEELGKQGARFSVFSGQCISASQLFNGEVEIEHIVPFSRCYDDGMANKTLAFKNENNQKGNLTPHEAFAGAGSQYSYDDMLKRALSVFGQTSKYERFKEDAYERFYGGEKGDMIARQLNDTKYISRKAHQYLSCLCTQHNVVSVNGMMTAVLRDVWQLNNFKDRATGHYREDHRHHIVDAFVVGLTSRSLINRLNTRRSTVDQTQKDLYHFLKSRVNDIPELKKELFKKLDLVVASYKPDRTQTGSMFNDTAYGIKSTEDDTKYVTRKAITALTEKEVLAIRDSEIRQNLIKHLTGRLTVENLREFKVSLGPGKDFIDKKASFAKKTGINKVRINVPNTSIEAIKSASYKGYGKNSYAFCDVWMIPHKKDKKSGEWLYRFEGDFVAFADAKHHDPESFKVGRHPAMKKLVRIYKQDCFTMTNKLTGEAEHIRIAGYDASKNKLDVRENLKAVNEKQNHISINTLFSNHQFKKLRLKRPAATKKAGQAKKKKDYKDDDDK

SEQ ID NO: 527 - protein, 1087 aa, synthetic construct
MAPKKKRKVMLKYRIGIDLGTNSLGWAAIQLGSELEPRQLLDLGVRIFSDARNPKDKSSNAAQRREPRGGRRNRDRKLQRSRKLLRNLIQYGLLPEHQTERKMLESQDPWSLRTRALDEPLSPHQVGRALFHLNQRRGFKSNRKTDGDNDGKVHDAIARTHDSLNLHNARTLGELFGRPRLEQMRTNESAPKGSRKPLPLARVRSRGQGAKMVYDYYPQRDMILDEFEQIWSSQAKFLPDILTSEAHDCLREIIAFQRELKKQDVGKCTYIPEYPRAPKALPSVQRKRILEEVNNLRVAATGEASRVLSSDERKILVDFLRLPSSKIGKRTFDRLRKQINLPPSQRFNLESLKRTFLQGDETAARLMQNDAFGKAWLDFDLTMQDEIVLRLLEEEDEDELIGWLQSEHGLNPDVAMRISGISLPDSYGKLSLEAIERLIPRLEAGERNDEAAAAEFGDHRALGDGEIHEDGLPYYGELLNRHTAFEKSDPKNDEERFGRVANPTVHVALNELRKVINDLIRRFGPPTQVVLELARDLPLSDRGLKDLERQQKDNQDSNDNRRKELEKLGVINNYDNRLKLRLYEELPQLNKCCIFSGKPISITDLFSSDIEIEHILPIGESLDDSFSNKVLSTREANRYKKKRSPFSAFGASIDGYDWEQVSQRATDLPPNKRWRFAPDAMDRFTDESNFLDRQLNDTRYIARLGKTFVEGLFGGQGARGQENSVWVVSGRLTSDLRHFAGFNGLLSDDNKKDRTDHRHHAIDAVVISLTDRTMVKRAADLAKREDQVAHYEIMKTMAEPLKRYRKSVEDRLAKMTVSHKPDHGFQDAMHNDTAYGITGQHDEKNQSILVTRKALDSFEKRSQLDAIRDETLRRIFVEATEGLTKSDFTHALIQEGRSQSPPVYTVRVTTPMKDTSFVVIEHGDGHKKAYKGDGNYCYDIWTDERGRWVGEVITTFQAYQKARKNPNWWRNRTGGNGQPLEMRIRKGDMLEIDDPAGRRKVMVYKFSKGKICMADHNEADASGRIRSGELMQTQMAPSSLQTVSAVQISVSPSGRIHRRNHLKKRPAATKKAGQAKKKKDYKDDDDK

SEQ ID NO: 528 - protein, 1531 aa, synthetic construct
MAPKKKRKVMKRILGLDLGTNSIGWALVNEAENENEKSSIIKLGVRVNPLTVDEQQNFEKGKSITTNADRTLKRSMRRNLQRYKLRRANLIEVLKEKQFITEETILSENGNYSTFETYKLRAKSATEEVSLEQFARILLMINKKRGYKSSRKAKSQDEGQLIDGMEIAKRLYEENLTPGQFVYQLLLDGKKFIPDFYRSDLQSEFDKIFDKQLSFHTEFLSTELKEELRGKKRDAVWAICAKSFKEKGFELVGIKRQGKTYEQKVENYAWRAKAVNEKLDLEQLVIVLQQISIQLNSSSGYLGAISDRSKELFFNKQTVGQYLMAQLNENPNTSLTNQVFYRQDYLDEFNSIWETQAKFHKELTEELKTEIRDIIIFYQRRLKSQKGLISFCEFESRQIEVEIEGKKKIKTVGLKVCPKSSPLFQEFKIWQKLNDIEIFPANEKKKKYKPNAKRLNQEQKELLFKELSGKEKLTKNQILSLLDMQEFDMNFNSIDGNRTQAELLKKYKEIIELSGKKIESNETTDNEINIISKTFNELGYNTDILYFNSDVENLDDEPFYMLWHLLYSFEDDKSNTGNESLINKLMFEYGFDRSSASILASATFQDDYSSLSAKAIRKILPRMKQGEDYTTACAYEYGKHSKNSLTKKELESKLYKNHLEIITKNSLRNPVVEKILNQMVNVINAIIDDPQLGKPDEIRIELARELKKSADERILLTESVKGNTEDIQRIKKRLKEDFPIFKTNEPSRNDIIRYKLWEELAPNGHKPLYGNKENLKKEISPAILFSKEIEIEHIIPKARLFDDSFSNKTLIFSSDNKDKRERTALDYVSQDFSDDFSNYINRIITVFGTKTTKRVNKLTKRIETDTKTFDSIYKEHERSLRNNKKQKEKLAKWDSSSEDEKKKQKKPWDRMSDTERNLEVIEKYYSGKLGKLALSEKDLPEGFINRDLANTQYITKEAKKMLGDLVKFVTSTTGSITDRLRDDWQLVDVMKEINYPKYEKLGLVEDEERIDYKTGEIRYTKKIKDWTKRNDHRHHAMDALAVAFTKRQFIQYLNNLNARRTNEEQGISNTEKEEHDNFAITAEDVVLNTRDVLGIEKNYLYRDKRNKLRFNPPMPLDEFRAEAKKHLENTLISIKAKNKVATININKTNKSGGQNKKQQLTPRGQLHLETVYGSAQQYVTKIEKVGAGFNEEQINKVAKKAYREALLKRLIENGNDPKKAFTGKNSLEKNPIWLDELHTIQVPDKVKTVSTETIYTIRKEISPDLKLDKVLDAKIKNILEARLKEYNGDNKKAFSNLDENPIWLNKEKGISIKRVTITGINNAVALHDKKDKDGKCILDDNGNKQAVDFVNTGNNHHVAIYRDEKGNLQENVISFFEATTRVNLGLPIIDKEYKEGEGWQFLFSMKQNEYFIFPNQQTGFNPNEIDLLNPENYSLISPNLYRVQKLSTKNYVFNHHLETTAVTGDTLKNKKELSNITYRFIQSLPPIQNIVKVRINHIGQIVSVGEYKRPAATKKAGQAKKKKDYKDDDDK

SEQ ID NO: 529 - protein, 1024 aa, synthetic construct
MAPKKKRKVMTKTTLGIDLGTNSIGWALLNEKKEQIIATGVRIFPEGVDRDQKGGEISKNQTRREKRGQRRQTARRRSRKHRLLKQLIEVGLLPQQQDDFYPLLTNPYELRKRGLDEQLSLHQFGRVLLHLNQRRGFKSNRKSDKQNQKETSDMLKEISQLESDIHENGCRTLGEYFYKIQNTDSNDKKQNHIRLRSHHTHREMYEKELELLWQAQQKFYPEVLIDDLYDDVRQTMFFQRDMYWDPKTIGLCELENQKRCPRADRMAQRFRLRQEINNLRLLDESTGEVRSLNAEEREKVYEKLSTTRERSFDKIRTDLGFDEHCKFNFENGKRNKLKGLETDAILSGKKYLGKKWFEYSDQRKDEIVYCIIDEKLGDHDFLDKAQNEWGMDKETAENLLGVNLPDHYMNFSRKAIEKLLPALEEGLPLMTDDKKESAMSRAGYLRPDQRPNKIEDFLPKPPDLPNPIVRQALFEFRKLLNAIIREYGKPDKINIELARDVKNPKKVREEISIKIWERTQLRETAKQEIEKLGEKPTRDNIARYLLWEEQGRICVYSGNNISLAQLMKGEIDVDHILPYSRSLDDSLQNKVVCFRKANADKGDQTPYEWLAEMHPTQYEEVQQRIRKLPFGKRQRFTRKNVELDDFVNRQLTDIQYISREVMKYVRCLGSEIVCTKGQNTSDLRHVWGLNTVLNNENLNIKNREDHRHHAVDAIVVALTDRSRLQQLARSRKRTKGQIEFPHPWPNFRNEAEKHINSIIVSHRVQRKIQGALHKETIYGATKKSGEYVYRKLITDSSFTLNMVNLIRDPVIKDLVIERLKKFGYEPGRGKGTIKKEVWKEPLTMLSGTLIKKVRLIKKNKTIQPIRGGNSHVQPGNTHHICLFKKEGKICKMISVPMIEAARRVKDHEPIIQRDPPPDYPDSVFFMSLSNNEIVMLKHKGVEDIYRFDTSASTSQQMHFIHHTYAVKEKTPAVRLSKKPSTLDARKITVDILGRIRNANDKRPAATKKAGQAKKKKDYKDDDDK

SEQ ID NO: 530 - protein, 1160 aa, synthetic construct
MAPKKKRKVMTRNNLSLGLDIGIASVGWAVLDSDHIIALGVRAFNKAEVAQTGESLNLQRRSARLARRTLRHRRQRLAKLAKLLEASGVITKERLYATPTRESYPSPWALRVKGLDECLAGEEWGRVIYHICKHRGFHWVSRVEEKKSGENAKQEGGKVKQALKSTRGLFASKKYRSAAEMIISEFPDAYRNKHGDYGKALSRTLLSEELELLFQRQSCLKNPHATDFLKNAVLGKGDKKTGLLWEQHPALSGDALLAMLGKCTFERQEYRAPRKSFTAERHVLLTRLNNLRITIDGARRPLTDNERRCALSLSYERAADIKYSKLRSALEKTCGTPSEFAFVGLAYPSEFQKQEEKAKNPEEAAVFKLPGWHELRTTLKKAGLEDEWKQLTCLALKGDPTLLDQVAWVLSVYKEDEEVVAALDDLPLPNKEAVIDALLSVQFSEFHALSLKALRNIVPKMELGLRYDEACTQSGYDHSQPFDPERQKSQSLPPFYLGHDHLSRMRLNEDVGDLPRNPVVMRALNQARKVVNALVGKHGAPHSVHIEMARDLSRPLTERRKIQKEQDDYRDKNDKNRSFFIEQFNREPRGQEFQKLQLYREQSGKCLYSLAPLDLSRLLEMGYVEIDHVLPYSRSYDDSKNNKALVLTKQNRDKSDLTPYEYLQGAQDTEAWIKFSAFVKSNKNYRAAKRNRLLTKDFDEENAKDFQERNLNDTRYICRYFKSYLEEYLELSDESEHRRCVVVNGRLTAFLRARWGLHKERSESDRHHALDAAVVAACTRGMVKRLADYAKGRELRYVQADSIDRETGEIIDFDRYKKLENEFPQPWQGFRGELLARLNTDDVSTLRASLSKLGTYSREEIEAVKPLFVSRAPQRRNSGAAHMDTIYQQTTRLKDERKISQKIKLAGLSFRQTKKTPKPITEQIEQFVKKLADPHRNQKLYDAVCDRLKAFAGDGKKAFSAENPLYKPDKNGNPTGPIVRTVTMSERMSGIPVRGGLAKNETMLRVDTFSKGGKHYLVPVYVHHKVTGLPNHAIVSGKDEADWREVDETFEFEFSLYPNDLLQICLKKQTHLGYFAGCNRSNGAIHLWAHDRSSKVGKNGLISSIGIQRAKHLKKFEVDVLGNRFLAKAGKRDGLAKRPAATKKAGQAKKKKDYKDDDDK

SEQ ID NO: 531 - protein, 1419 aa, synthetic construct
MAPKKKRKVMKRVLGLDLGTSSIGWALVNESENSDEQSTIVKLGVRINPLSVDELQNFEKGKSITTNSERTLKRSMRRNLQRYKLRREELIRIFKESGFIADESILSENGNKTTFETYRFRAKAVTERIQLEQFARVLLMINKKRGYKSSRKLKSQDEGQLIDGMEVAKRLYDENLTPGQLSLQIFQSGKKKLPDFYRSDLQLEFDRIWNFQHQFYSEVFTENLKEELREKNKNQTWAICEKPFGIVGIKRDTKGYELKKENLIWRTKAISVQMDLERLAIVFQEINSQISNTSGYLGAISDRSKELYFKNQTVGQYLMKQLDTNPTASLKNQVFYRQDYLDEFNTIWESQSRFHKELTEELKKAIRDVVIFYQRQLKSQKGLISFCEFESRQIEIEVDGKIKLKTIGQHVIPRSSPLFQEFKIWQILNNIEVIVKGKNIRKRELSIVPDDIENLLMNEGRRKLHQEEKERLASELSIKEKLTKAEVLKLLFENPQELDLNYESIEGNRTQARLVEAYKQIIELTGHKIDLKKSAEEMLKSISDIFRALEYNADILYFDSEKPLDKQPMYKIWHLLYSFEGDNSKTGNENLISKLSELYGFEEEYASILANITFQDDYGNLSAKAIRKILPYLKEGNMYDIACKYAGYRHSKSSLTKEEIKNRPLKNRLDILPKNSLRNPVVEKILNQMVNVINAIIDNYGKPDEIRIELARELKKNAKERQDLTQIINKTTTEHKAIKDKLNKEFGLPHVSRNDIVRYKLYEELKINGYKTLYSNTYIPQEKLFSKEFDIEHIIPQARLFDDSFSNKTLESRTVNIEKGDLTAYDYVRNKTDAKGLEDYLSRIEDLLNTGNISKTKYNKLKIQEEDIPDDFIERDLRDTQYIAKKAKTMLESLVRRVVSTTGSITAKLREDWQLVNVMQELNWDKYNKLGMTEIFEDKDGRKIRRIKNWSKRNDHRHHAMDALTVAFTKDVYIQYFNNINARYDKNSNAYAIEQKYFHDRKVVPPMPLDMFRSEAKRYLENTLISIKTKNKVVTNNINITKNKAGTNKKRQQTPRGQLHLETIYGSQKRCMVRVEKIDGKFDTAKIETISKDTFKKALLDRLHLYNDDAQKAFTGKNGLSKHPVYIVDNAGTRHSLPEKVKTVTFETVYTIRKEIAPDLKIDKVVDKQIQRLLEQRLSEFNGDKKRAFSNLDENPIWLNEEKGISVKRVTISGISNAEPLHDRIDKDKNLILDDNGHPEPVDFVNTGNNHHVAVYMDSNGDLHENVISFLKAVTRKKLRLPIIEKNYKSEEGWVFLFSMKKNEYFIFPNKETCFNPNEIDLLDTDNYYLISPNLFRVQKFTIRDYFFRHHLETNVSNDSELRGVSWIRCGLNDIKGIVKVRMNHIGQIISVGEYKRPAATKKAGQAKKKKDYKDDDDK

SEQ ID NO: 532 - protein, 1382 aa, synthetic construct
MAPKKKRKVMKQDYFLGLDIGTDSVGWAVTDTSYKVLKCNGKALWGVRLFDPAQPAEERRMARVARRRLERRNQRLKWLEQVFSEEIAKVDPAFFQRLRESKFREEDKKSDYPLGRYTLFADKAYGDKDFHRDYPTIYHLRRALIAEAHPFDARLVYLAVHHILKNRGHFLFGDMSIDAITFEASFEKLRQHLLEAYELKLEVSDLDSFSSVLTNRKLSITAKSAKLIELAGLPKEKGPVQAMMQLLAGRKVALDALFDEELPTDDVPSFSLRDDFETVEGKLIEVLGDRIDLIHLLKEIYDWALLAELLNGYRYLSFAKVQSFEKHRVDLKRLKGILKAVDGKAYAEMFRHAKKDLDNYLAYCGHGAKGYHCDADAFYKYLAKQLKAISPQTEEIRNVLQEVECRDFLPLQTTKDNSVIPHQLHEAELKLILKNAAQYLPFLNETDETGLTKKEQILQVFRFRIPYYVGPLNEKSNRSWIVRSPEKIYPWNFEQVVDIGKCAERFIAMMTAKCTYLGEDILPKNSLLYTRFSVLNELNNLRINGKKISVKQKQRIYIDLFLHGYKVSQKRLKDYLLANGIMEKADVISGIDGDFKSNLAPWHAYAWLLNRENGVDIAEDIIRHITLFGEDRKLLERWLRDYYSAALSDEERRQALRQKYSGWGKLSREFLTIIFHVDPNTGEALSIIDALWNTNDNLMELLSGRYTFLEAVKEYCEDNTDMKSGTLQDYLDEHYAAPGIKRAIHQTVAIVGEIEKIMKCSPTRVFVEMAREDGEKGKRTVTRKAELSGLYAKCGEEAGELLEQLEARTEGELRRDKLYLYYTQLGRCMYCGEPIDLNRLDVDYDIDHIYPQSKTKDDSLQNRVLVKRELNARKSDEYPLSPQTRTARRPFWEMLRTKGLISQTKFERLVRASGFTENEMEGFIARQLVETRQSTKIVAELLQNRYGDTSDVVYVKAGNVSVFRQDQRIGANGKQKQAGVCGHNEVTIQDPLFVKCREVNDFHHAKDAYLNIVVGNVYHVVFTKNPLAYLKARDFKYSLNHIYDYDVVRDGERAWTAGADGTIATVRHVMGKNNILYTRMAKETKGPLFDLQIVGKTKGQAAVKSSDPRMTVDKFGGYNKPTGTYFCLVEHTVGKKQVRSLEPVLLMHKALYEKNPMDYCTQRLNLKDPRILISCVKIDSLISFDGFRMHISSRSGNQVRYKNANQLVIASEWQTYFKKISKYLDRCKKAKTDLPVTLFDGITSEENIRLYELLLEKLRTSRYHVKYETAATTVAENRGKFNGLAVPEQCRILMQVLNLFACNVDGADFKALGGKEGVGIVQTSKNLSSYSGHSIKLIHQSVTGVFEQEVDLLAEDLPKRPAATKKAGQAKKKKDYKDDDDK

SEQ ID NO: 533 - protein, 1139 aa, synthetic construct
MAPKKKRKVMPFRFAFDLGTTSIGWAVYELDPVTWKEQKRGKPVGLRRLGVRIFDDGRNPQSGKSHAANRRLPRTMRRQQDRRLARRKRLEQDLADCGLLPDRGADRDALFSCVDRNGKSSHPGQSCPQSPDADCRNPYRLRARAAAGEVTLHELGRVLWHISRHRGFKSNRKADQGEDDSGLIRSAGKALEARLKSGGHPTYGAYLWSRLQAGEGVRVRPQGDGAEKHYEFYPTRDMLEAEFDCIWAEQTKHHPRLTDEDRDRLRGTIFFQRDLRPVDPGRCTFFPERPRLPRWHPDAQAFLILQQLGHLRIIRETRESRLDPDRHAVLFDALYGGRKMTWSNVRNTLGLTSQDELNLANGGLKHLHFNEVAAALVGTTRKPGPLAARWPEYDTATREEVLKQLAQTESPDALIRWLAGELGLDAGTAAAVERTQLPDGHLRFCREAVEALVTEMRSDVITYSEAVEQAPLLAAADIRHSDARPDSGVDNLPPYNELPVLQRMLGTGTGNPEDPHDVRLGRIANPTVHIGLNQFRRIINMLTAEYGKPDEIVLEAARDLSRSPRERAEVEKRIKANEKRNDGYRKRLEEEDVIGPGQRVGELFLKMRLWEELGRNEADRRSPFTGRPISLADLHSEVEIEHILPFGDTLDDSPANKTLAFREENRRKGKLSPGEAAARGIFDQQTIIDLTKHLPRNKAWRFLPDAMEVYEEQKSFEARQLHATGYLARVVRAYAEALFDKRDPDGVNRTHVWMLPGRMTALLRHRWGLNLGDHNRKDRNDHRHHAIDAAVVGVIDRRMIAGLQRAARAHGAMMLERVLPDPPDPFPGFRDAVHAAAREVRVSHRPRHLTASADGPSRTSGRLHEATAYGLVRDVPENQADRTIGNVVVRKQATALSRKEIGQVRDVKLRRDLLEATEPARAAGLKESEAEKLRAELLADWSRKTGHRRLRILKAENPVRAVHDCAGRAYKYFAPGEVACVDIIDVDGVWKAHPLSVWDANSGQGRAWNDAYPSGRFVMRVHKNDTLQLFDWDDEEEEVVPGSNSIKRVVRLEPSNKRLRLCDLKEAGTLQKRHKDEDDDFRWDLASISKLKLRRARRVRIDELGRVRIIPHGMAKRPAATKKAGQAKKKKDYKDDDDK

SEQ ID NO: 534 - protein, 1211 aa, synthetic construct
MAPKKKRKVMSKKKSSRYHQQAEQIRNRLNNRPYTIGLDMGVGSIGLAVIALEEIGGRLTSTDPIFTTSRIFTPSTGASERRGKRGQRNSIRHKSNRLRFLWKLLASQNLMLPLSSEAVADPATLRFDDETRKKDPYTLRLKGLSEQLSLPELGYSLYHIANHRGASSIRTFLDDEKSPDDEKLDEQIRETEKLAKEKGLGTFIEVLAAFNENKLIGYRNIDKLKASKVPVPTRDIIENEITTLLENQSTFYPETLSTEFQKKILDAILYENEKIVPEAGNCPYYPDEKKLPKCHFLNEERRIWEAINNARVIIPEQQAKGFIKMIPTPFTEDERKDLFVFLREGKDLTPTAVKRMFEQYKNWDMTLQGRDAKKQKIKGFRFKDLEERPFWKSFSEDQQDQFLYAWVNTPDDKKLKCLLIDTFHLSNDVATDALKTVELIGDYAPIGKTATKLILKYLEDGASYTEAIEKGVEAGELDEVGQWEVQEKLPYYGKILTGSTQAIMGKYWHSAFKEKRDLAGFHKPKTYWEEECYGRIANPVVHQSLNELRKLLNEVIDILGDKPAELVVELGRELKIGSEMRNKISMDQNKREKESERLYAKYCLPNNLGKRYIQHFRLLTEQKFICPYCLKTISIAEVAGGTADIDHIFPRRETADDSLANKVVSHGSCNKEKGKRTPFAAFSSRDNWSQIMHYMATNPDMYAKRKKFEKDEEEYQKYLESRGFVSRFKTDNSYIAKAVVEYLRCLFPTNDLNSVRSLNGRETSILRKSWDLQKISSELGALHILKNKDENELGRKDRTDNRHHALDALVAGYCSRSLIKKINDLSSKGIPAEEIERALPVPGFPETTIETANNQKDVFSKKIKAFLELNGFISLKIDTAVNGPLLKDTIYSILGANEHGEELIFVVKKSVSTISVKEGSLEEVVKAIHGRFSANHPKWYSDELKTKIEGIQDHNQKTITRYQESLQKAQQILEANNEKNKEEGKKPLELSARNISKKALELCGGTYYLLSNNTRQKTFVAKEPTKQTKGFAYDTGSNLCLDLYHNKEGVLRGEIIRNIQAMNKNFIPKYKQAGFSLYERIYQGDVLEIEGTSPVELTEKSSGSDKVASVRTPNALSNRTFVSVVTFTETVSGIQAFFSNICKSRADKDASFSLGSLIKLNARKVVLSPAGLVAYVSRPLLDIPKEEKRPAATKKAGQAKKKKDYKDDDDK

SEQ ID NO: 535 - protein, 1101 aa, synthetic construct
MAPKKKRKVMGRSKNGAMQRYRLGLDLGTNSIGWAAVTLDDDGQPCGVLDMGVRIFPDGRNPTDKTSNAATRRVARGARRRRDRYVQRRSNLLKALITYDLMPTDYNQRRQLATRDPYTLRAKALDHPLPPHELGRALFHLDQRRGFQSNRKTTGDDDDAAKQIGPKIEGLNKSMAASGARTLGEFLARQLEQGYAARFREGAEFYPERAMYKAEFAAIRAAQERHQALSAAQWDTLHEIIFYQRDLKSVEPGWCRFEHQEKRAAKALPVFQEFRMLHEIGNLKLHVGSEPERPLNDGERERALERLRAGKDINLKKPVKALGLPAGATFNLGRGGVRTIIKGDEATARLVEQRKKGQPTQTLFGKRWLTLSLDERNEIVRSLLDTEDPAVVRRKARENWGLTDAQAQAVSAVVLPSGYGELSEKAIKKLLPHLERGLRYSDAVTAADYLHHSDFRNAEAHERLPYYGAVLERDAVGADPTKDPQRDGEVARYGRIGNPTVHIGLGQLRRIINKLIAVYGKPEEIVVELGRDLKANKDDRDWYRRQQREGKARNEKYKEWFGGVEPRPHTRLKLRLWEEQGESQARFCPYTGKRLSFEMVISDQTEIDHILPFSQTLHDSLANKVVCLATANRYKGNQSPYDAFSHNPPGYEYQAILARAAKLPDKKRWRFQPDAMQQFGGKRDFLERQLNETRYLSRTARDYLAYLYDEQTERRRRVRAVPGHMTALLRRGWGLEGMLRESKDGEPSRKQRDDHRHHAIDAFVVACTDQGLLQRFAEASNSRHDRAARLPAVAGEAPPWEGFGRSALRPFLDRLVVSYKSAAGAHSDQTTGQLHNETAYGLLEPAGAGPSKVVTRKQLSAVKRKDLEAMVPGQPLQAALLALWDQVAAEGKKPADFAERAANKGVLVKGQRQRVRRVRVVDKQTVIPIKDHRTGKPYKGYRAGGNEFADIWQLLDKTETWKLVAVPTFDANQPKFDLDKYRPHPAAKRLIRLRIDDMGALGEGPERRIVRVRKITNAQTGVLVFLDDHNEANVPDRVRKKEMKSNPYSARQLKQQGFRKVRVDELGRVRDPGPRAPKRPAATKKAGQAKKKKDYKDDDDK

SEQ ID NO: 536 - protein, 1566 aa, synthetic construct
MAPKKKRKVMAKILGLDLGTNSIGWAVINVIIEDGKVVKYISIDDTGVLIFPEGVEPTTIGKGDKEQSKNSTRREHRQNRRQVYRKKVRKFKLLQSLIGLNMCPLSIDSLNQWGKWKKTEKTEGKKFPSEPEFIKWLKLNPYELRYRGLSEDLSLLELGRVFYHFMQHRGFLSSRKGGDEGAIYKGKDNMTGINDTRNLIGTDTLGKKLYEILPKEGEEFHYKTDANGNELRVRSRYTERGMYIEEFLKIWERQTAHLGLDNMLIKSSKVRFLKGNLESNRNRKKINNYFDKYGKENVEIAGGKVTTYKEILLKTFLAGEIESGIDGIKFKSNESLLFWQLPLRSQKNLLDNCRFEQNRPVLMGNGDFRRKNGEIVYRSKKPCPLSHPEFELFRSYQIINNIKYGKGERLTDDQRKLVLDVFSTKDNSFKFEQIVKALKLTYEEFNYDLDQKISGNPTIKKLKPLFPEEVWNRCYEKIWHCFYFYDDNVRLLKKLKEDYQLKNSFDIEKIKKIRIAEGYSNVSLKAIRNINPFLAKGFTFSEAVVLGGIKNAFGPRWEFFNIPDIIGGLESDVLRILHEKGNKEGEAINKIKDYLSDPLNNYGFSENDPAFTQLYHHSQEIENRDIEDWVPELENLRNPIVQQALYEMRRLVNELLRKYRKQDPGFIFSRIHVEMGRNLKNTKSKRQEISVKANENTNKNENARQRLAELGQRPSRDNLLRYLLYDEIQKHSSGPVLCPYTGKVISVADLLDGTNAVQIEHIIPKSISLDDSFSNKTLCESKFNNLKGEKTPFEFYLINHDYKLWGIQKHDNIKDGWNEITERVYKILPYAKARKFSSKNEFKVDDFIERQLNDSRYISRKAVELLSSICSDVRMLPGQVTAELRHLWGINNILNPVCGMQDCEVEVKAGKRLAYYVLTDEHRKVKSMLRKTNDRPTTNSNQLVLSGILNKNVLSSKYLSLKINVPNMIDGKYWVLVNVSDKTSLFPVFAKKPVSDLDHLVLKGRVEKGFFKNDTIGNNIKVKEDRDGAYWARFSVKKFELKIAENKGKVKTKTSEVALFGEVKNGLFVCHIYQCKTNLPDGKYWAFMQLDFEGFELMRVKNIKPETNQNQILGYVTVDENENMVADIDPAYSKRTEQNPGRYYCVFNIESIEQDLYPMENDPPKPKKGEVLTEAVVWVDEATGEIRYDPKKNREDHRHHAIDAITVALTEQGFMQRLSTYYAKEENKNRSLDNSEKFPMPWDGFEKDVKKFAESILISHKQNNKVLTRISKKIEKNGVIYKSVGFSARGQLHKDTVYGKRTPPGHKEAYHVRKPITSLEDKKQIGKVVDGVIRNLILEHLRDNCGVDISNDSFKVPKDAFFKNGKPRLFLPNRKGGEPVPVKKVRVRENFGNAHNLKSSVNQYVDLKNNHHALIYLKYDGKLGEAMVSYWEAVERQKQGAEVFRLPADGKESIAILQTNDMFLLGLSNEEFENNKNNPAFLSKYLYRVQNISSKDYLFRHHLASIVTNKNDQYRIQSFKAFQKANPIKVLIDKLGSIDSIEKRPAATKKAGQAKKKKDYKDDDDK

SEQ ID NO: 537 - protein, 1022 aa, synthetic construct
MAPKKKRKVMSDITLGLDLGPNSIGWALVDESREKLIASGVRVFPEDVNHEPNEADETKTKHRRDKRLARRQTTRRASRKKHLKKLLCGAGLLPVKDTDLHALLENDPYDLRRKALYERLQPYQIGRLLYHMNQRRGFKSNSKADRARKKETSKMLEEISDLQEKIGSAGCRTLGEYLAARRLDPHERVRGKHTRREMYEEEFDAIWNAQQKYHKGLLTPELRQKIAGTIFFQRDMYWRTATIGRCELEPGQRRCPRADRHAQRFRMLQEINNLRLLDTSTGEERRLTEAERTELIKYLSTQKTRTFKDIKKKLGLFDTCSFNLERAECSSLKGLETDAMLANKNIFGKDWWRLDDGLKDEIVAALIDEKSEYDDESLLEIAQQKWKLSLEAAERLLDINLPSGYMNFSRKAIDRLLPHLENGLVLMSNDETPSALREAGYLRPDQRAIKSYRFLPQPPDLPNPIVRQALHEVRGVVNAILREYGKPDRIHIELAREAKGSFEDRRQILIKNKEREKKRDEARKSIEEHGRKATRDTIDSYLLWKEQKETCIYSGKPISISQLLGGEVDVDHILPYSRSLDNSLMNKVICFRAANADKGDRTPYEWLAESDPDAYEKMLQRSRNLPYGTYNKQRKFLQKNVELDDFINRQLTDTAYISREVVSYVKCLDVKDVLCTRGNHTANLRRLWGLNCILNPNWEDFKNRDDHRHHAVDAIVVALTNRSRLQVLARTHGHDMEPPWGSFRADVEQAINAINVSHRVQRKIRGALHKETIYGPTNENGKFTYRKELENLTLSMVDEIRDKTIRGLVIERLKKHGIEPGRGSGSSIPAAVWKEPFLMPSGVPVKKVRLVKTDETIQPIRNGTAYVKPGSLHHLCLFKQINEKGKLVLDAVFITTLEAAQRAKRGEPIIQKTHPQNPTAQFVMSLSMNEMLILEHKGKEELCRFISAASTSKQMWFRIHTFAGKSADRRGQISKKPNTLKARKVTVDRLGRIRWANDKRPAATKKAGQAKKKKDYKDDDDK

SEQ ID NO: 538 - protein, 1126 aa, synthetic construct
MAPKKKRKVMSISFSFDIGHSSIGWAALKVDSTEPEVLGCGVVAFQPKDCQNQKRAGFRRQRRHIAATRNRIKRLEAFLQKAGVLSAADVTYCRENPHPWPWLLAAQVLRGERKLEERELWAIIRWYAHNRGYDGNALWAGEDADKDDIKKVKAARDLMEEHKTNTMCETVCVFLDADPTSTANPNLKKYFKGENVAFPRSTVIAEMRKILKTHVGELANITEPFIKALLDDWKCSKVAGFDAKLPQRYFGGLLFGQLKPRFENRIIPKCRLTGEKTPSKHSREFYRYRWAMFMNNLRVASDQGLPPRPLRVAERCALDKIMHEKGYLIKSDLTKALKKSLKLEPVNLEAMLLVPEMENALTLDPALREVSGNKHLKKVWPLVPDERKRVFLNQLFHSRNFRGKPPSIGQWKIRLAEDGAAIEKFDEVFPEIFEAESEKLAKKNLTLTQQEFLDRPIHLSKRASGRAPYTRKKLLDAVACVMRDEDPRSHGGPLEETEEARSRQQNESIDRNSNNHLVRHRLKIFTRTLDDLVKRYANDDPASVAWVGVEVIRDLVQFSGKTEKEKAKILSDQLSHHRKIVKILEEKRESTGGNWEINIGLIHKVRIADDMGWKCPYTGNDYNLNNIIHGKVELDHIIPYSKRPTNALHALTLTFPEVNRQKGARTALEYIEDPQNEPPHSPNQFKKFVENLKKKNGPSKDDEMRCRKRKIALLTPHYEKYGKGAGTNEADEGEVVDGFTEGSLSQTSYLNKLAVQETSRWFTECLGSEVNSPPVVQLPGSVTAATRRKWKLFGQLNEVCPETRNKAKADVRKITHLHHAIDAIAIGLAVHYFPKEDGRLHTLLSRRSIRNPDDQAYLKKKLGDLICFCNNGCWELRDLSPCVKEQISERLLEKKVVRHIPRTMRGLRVQENIWGVEGEDPDDDTKLRISMKSRGEDGKKSKSKNKSERKTKLLGYRPNEASEGKLKQLKGVLIVEYNFGVALDPEPKVISYQQVWKQISELKEANKGRPVRIIRNGDIIRIPRGQRYKGVWRVHSVKDKAIGPVLNLASPEFVNLERTLKMDRERESEDGNNPRAKEDVRLRTLLKDGLEILNCDYAGHVRKRPAATKKAGQAKKKKDYKDDDDK

SEQ ID NO: 539 - protein, 1122 aa, synthetic construct
MAPKKKRKVMNTEVESSTLYRLGLDVGTNSIGWAAISLDGDGKPCGILDMGVRIFPDGRNPTDKTSNAVNRRLARGQRRRRDRYLKRRGKLIKTLIEFGLMPAGKEERGSLAKSDPYKRRAGALDRDRPLGPFELGRALFHLNQRRGFKSNRKAGGDDESEAQTTRAEIDALRKSIRESEARTLGEFLAERHEKGKKGEKDGTVRARPGHELYPDRALYEAEFDAIRCAQKPHHPNLSDSQWDRLKDIIFFQRPLKPVDPGWCLFERGEKRAAKALPIAQEFRMLQEVNNLKIVVGFEPERPLNDEERARALERLRAGNPINLEKPTQNLRLPVGATFNLSIGGRKSVKGDETSARLVTAKKEKGERKAKDIFGSRWHALSLDERNEIAGFLIDTEEPEAVRQKAREDWGLNDAQAKALSEISLPDGYANLSEKAMRKLLPHLESGLVYSEAVKAAGYSHHSDFREGEAQDSLPYYGEVLERDAVGADPTKDPEKDGEVARYGRIANPTVHIGLGQIRRVVNRLIEVYGKPEEIVVELARELKLNRDQIRELERRNREGGERNERFREMLESAEQGLSADTLQRLRLWEEQGPEHARLCPYTGKPISFEMAVSSRTEVDHILPFSKTLDNSISNKVLCLAGTNRTKGDRSPYEAFGHNPPGYDYQEILAWSDKLPDNKKWRFKEDAMERFDDESAFLDRQLNETKYLSRTARTYLSHLYDEKTSGRQRVRVIPGRMTALLRRGWGIEGMLRESENGEPPRKSRDDHRHHAIDALVVANTTQGLLQQFASASASADSADATERLASMVPLPWDGFHRNEVQPFLDRMVVSYKQDHGTRGGLSTTGQLHNATAYGLIEPLEDGSYKVVIRKNLDKLKKKDLESDAIRDPLLRKALLRLWEEVESLEGKANPAKFAERANTKGVLIAGKRQRVRRVRVVDKQRVIPIKNESGKTYKGYLPGGNEFAEVWRMLDGKWKTVVVPAFEANQPGFDPTKFRPHPAAKKLMRLQIDDMGALGKGESRRIVRVRKIDAGSGGRVVMDDHNEANVPDRIKQDMRMRRETGVDTGMKEEVFSAQKLRRLGFRKIGVDEIGRVRDPGPLKKRPAATKKAGQAKKKKDYKDDDDK

SEQ ID NO: 540 - protein, 1093 aa, synthetic construct
MAPKKKRKVMKNTLGIDVGTNSVGWALINENGIIDTGVRIFSEGVNRVKGVEESRNVKRREARGIRRKLFRYKLRRELLMRKLDDLNMYPEHFTETPAELYELRAKGLDERITLFQLGRILLLLNKRRGFKSNRKSEQSEEAKSKSDYYKELDELNEKIKLFGCRTVGEYFYTLFKQGSQLNDNTYEANERIRARFVYRDNYITEFDLIWDKQAEFYPDTLTEKNKIEIRDNIIFYARPLKSQKHLVAKCRFEPKKRVAPKSSPQFQEFRIWHTINSIRVDDKKEIHRKLEQSEKLKLANFLMVNSDISHAKIKKILSLESSASLNDLPPKIKGNTTYSKIMQVVGTDKFNSLSDRELFLIWEKLYYAHDSEWLVNNLQAKHGLPLDVAKKLANVALEQDYGNLSTKAIGKILKHLKQGKEYNKACEEEGYRHSDYFLEGEERPPLTEKILVSNNDPVLSQIMSPLVKRSVTECIKVINAVIKKYGKPDIVRIEMGRDLNMPKDIREKSHRNNRDKRALRDEYEKFLKEKFHFDRVGKSELLKFELWLELEHSGAELSKLTSELSSDDFRRFSRNVKPSDKEKFRLWLECGRISVYTGKVISVERLFSPEYEVEHIIPYSVSFDDSFANKTLSERTFNRDKGNKTPIEYFAENEDELRKFKQRTTKFGNAKKERLLLEEIPDEFRPDQLNNDRWVAVALKKKCLEAIESVEVTNGAATAKLRRYWGLNTIIKSEEDKKSRDDHRHHAIDAIVIAYTSIRFLQQISRYHSLRIHDKVIQDRFEPPFEGFRNEVVKFVSSILVSHRKDKRLLSTKNNKYYHRRSGSREHQKGIMSVRGQLHEETIYGKILDPYSGREEYVVKKQLSKLTPEQVDKIVDKPIIELIKETAELTGKSIKQVLNEDLVQYNEAGKGVRIRSVRIKAVHKPQSIIVKDKNGKISERNVMLKNNYCANIYANKKGKKIMNIISFYDAVNRKIRNQSLIDDFPELEYLFTITQDDYLLILDENIDDIPDDKDYIFNHLYKIRKFTGNEIGILHHCDSENKNLWRMNCSKQKYIKVEVDILGRIERRIKRPAATKKAGQAKKKKDYKDDDDK

SEQ ID NO: 541 - protein, 1088 aa, synthetic construct
MAPKKKRKVMKWRLGLDLGTNSIGWAALKLSEDPTDCSKLACSELLDLGVRIFHDSREPSSNGRVGESLAVQRRMARGMRRNRDRTLNRYRKLMRLLIEFGLMPDNRSERKSLKYLNPYQMRAEAVARVISPYELGRALLHLGKRRGFKSNRKTDTDDKETGKIKEGIKELRDTLEGQTLGQYLWKRYQDNLSGEKSGKVQGIRFRAEDPFFPDREMYAREFDAIRSIQEHAHNLSHDQWDRIKEECILFQHPLKPIERGRCNFFPDEYRAWTDTPIAHEYRIWQELNNLQWRDEEGISHGLMAHQRDAISELMFQQNEVSFSKIKKLKDKEGKLLFPDIVEFNLESEKRKGLKGHTIAARIAKDPTLNSLWRILGNQWNEVFETLHQATDDEEAEKNLERIYSFSPEQIKSLLSFHLSPGTQNVSRKFMEKIIPIMRDQGIRYDEAVLEVTDDDGNPLHHSLSTIKAEYDFLPYYGEILKGALYGGHPEKCSPEENPEVHFGKIGNPTVHVALNQLRKLVNTLVERWGKPEQLHVEVGRDLKLPKKLREKIEREQAANQKENETIKAELEKGGIKQVSRTDLIKYRLWEELGKDKLLRTCPYTGKTISFSQLINGDQVEIEHILPFSRTLDDSRANKTVSKTWANKLKGNKTPYEAFGNNQHADKGIVWEEILERAAKLPQNKRWRFFPEAIHRYEKDNSFIARQLTDNAYISRVSAKYLSCLVPYNKIVMMSGQMTGMVRGKWRLNELLPKPIVDGKVDDNWKSRDDHRHHAVDAFTLSLMDRSLLQEISRISGRRPTGIFDIELPLPDTGLVEKAKQRLSEIYISYKPDHGHLGRMFMETAYGVVDEKLLDPEFPDYNLVTRKEVFLLSDKEILHIRGKALRTRIQQAVRRGAEKGLKPAESLKRFSAKTGIKKVRVWVSNKSAQNIPSAPWKAYAMESYVCCDIWRIPKGKPGKWKKNDYKWQGVFWSYAETVGDDPDKNLKKPHPAAKFEMRLYKLDTVMTGEGKICRVAGYHAFQNKLDIRPLNKTDSSQNFISINVLGSNGLKKAIITVDGRICSSCKRPAATKKAGQAKKKKDYKDDDDK

SEQ ID NO: 542 - protein, 1090 aa, synthetic construct
MAPKKKRKVMSDYILGLDLGPTSVGWAAILIDKDGNPTGFAQIKNGQESMPAIGVRIFEAGVENLGQGSQEKPKNLDRRVSRSTRRLLRRKRGRYLRVKKLLQENNIIPTQKESMDLLNQKDPYELRDKAITKQIGLDELGRIILHITRRRGFKSNRKTPDKDASMGEIKKGINRLKEDSKEKTLGQFWYAQIQDKPLDPIRNRQGGYHWVAHRDQYIEELRTIYEKQKNYYPTQLTETLYQKLNQTIFFQQTYELSKRKKRKVIGMCSLIKGQRRCSLADRRAQEFRLLQKINDLKIIINGKEYPLKKDQHQILYAYLMEHKEAKFDKIRDLLNLPDDVRFNLHYKTNDKILGNVIDSYFCGKKIFGCKQWKTLEENEKEDIWQYYIKEYLSDHSDLSADELKSYYEKKYGLTVKEAKAFDSFMLPMGNVSYSAKVLDIILPDMRKGMGLYDAIQGKFKKKWRCLKELPLPIKANDFHSTNPIVVSTLHQVRKVVNGLIRELGKPREIVLEMTRDLKANAERRAEIQKDQKHNQDERKSCEKQIRIEFGYDETVAISTRDITKYRLWESQKHLCAYSLKRIELSELFTRNIEIDHIIPESMSLDNTMWNKVVCFAKENQDKGQRTPIDWLGEQSERFQTLMVAIKKGSLGNDTRKWERYSIRAKDITDKYTPERLLRDTSFIATLVRDYLKRLYPHHTADQCVRTTKGGVTAELRNVWDINPILADGAIDKKNRDDLRHHAVDAAVIAVTSVGMIQKVTRAWQQIWPRRPYASGNIPFPWPSYVDDLLKVVAGINVSHRVQRKVSGALHKDNIYHLETNGPNAGKYTKRQPLNKITRKNAESICDRSLREFIIKHLEDHGNDTIRAFAEPLLWHCKDGREVMIKSVRCNTDYKSLLKIKENAYVQSDKNHHIEIFRGKVKGKVEYFHKVYSIWEVSQQLLKMRGKRSQGETGRAIITRQKPCPDNLEVSDMEFVMSLAKGESILIDDKKVENQQILARVRDFNSGGDSLSSVELNIVGHTLARVEGKIVKDTANAYRLRNINELAKLHVRKVSVDPLGRIRWANDKRPAATKKAGQAKKKKDYKDDDDK

SEQ ID NO: 543 - protein, 1367 aa, synthetic construct
MAPKKKRKVMAKILGLDLGTNSIGWAVVEKEDNQFSLLDKGVRIFQEGVKIEKGIESSKAAERTEHRSSRKIKFRRKLRKIETLKVLSEFGYCPELSKEELDLWRYKKIYPNNPALRNWWLTDDKENKHPYYYRHLATTQKFNLNIESDRFKLGRSFYHMAQRRGFLSNRLESTKESNGLEEEKGELTLGEYFYQKYEKGEKIRDNYTHREKDYLDEFNRICDFQNIPNKIKDKLLKAIFYQRPLKSQKGLIGKCVFEPNKQRCSVSRPEFEEYRMLCFINNIKIKTPDDEKLRFLNNDERKKVISRFFLQREHFDFEDLAKQLAPKKQYKFYKDRNKNPEDWLFNFSMKTTVSGCPVSARFKELFEDIFMDKQFNYIKDETGNTPKIIVDTWHALYTFDSDDRLKEFAHKHLNLNNEQIDSFLKIRLKQDFASLSLKAINKILPYLREGLIYSHAVFIGNMEEAVPNNIWNDKENQLLIKNAIKDIINNHNDETTIINIVNGFITNAKRENTTWSEESKAILLEELNNKIIQTFGKYRFESFSEAKKTHLTERANQLLIENMPKNYGKGEHIKAQRIDEAVQTFLTDNFGKVNTEKIYHPSAIETYKPAKRADDGNLYLGSPMTSSVRNPMAMRALHQLRKVINELIKEGIIDTDTKINIEMSRGLLNANERTALRRWQDDREKQRKEYANKIKEHFGNNYQPSEDEILKYQLWIEQKGVCLYSSEENCQINIEDFLGNNPSCDIEHTIPRSLSYDNSQENKTLCKNEANRKIKRNKIPYELSNHQEILLRIEHWREKIESLDKQIEITVKRAKGASDKARKDSEIQKRHYLTFERNYWRNKYNRFTMKDVPDGFKNSQMVDIGIITKYSRLYLKTIFNKVYTVKGSTVADFRKMWGIQNSYEKKARVNHIHHCIDAITMACMDKSNYETLAKFYHDSENAFQNNSSSKPYVEKPWQSFTEDILSLENEILVSHYTPDNLPKQSKKKLRKRGKIQYNESGEPKYQQGDSVRGSLHKKTFYGAIEREVINKKGESEKVIKYVVRKSLASLEDNNIKNIVDDRVRNIVIEARKQEKEIQKQIDALTKKRKKAEEWEEVEIDETIANLKIQIEQLYTLPNKNGNSIPIKKVRVYQPTVTNPLNIKTQRDKSTKSKKEYKEHYHVANDGNYLMAIYEGKDENGKTVRDFELVNNLNAGEYFKLSVQKDLEGQDLGKYEGLIPKSKLTKKIQIPLKAVINVGTMVILWENTPDEVWDLSIEEIKKRLFKVNGLSILTIQKKYNYGRIYLKIHNDSHPSTELKEHSGEYKSTDDIFPFRMILHNQLNALIEGIDFTITPLGKLIKIEHKRPAATKKAGQAKKKKDYKDDDDK

SEQ ID NO: 544 - protein, 1105 aa, synthetic construct
MAPKKKRKVMGYILGLDIGTNSIGWAILRDRSIVDLGIRIFPVGVKEDLYNKSGTEESKSSARRTARGIRRLYDRYKLRRRQLKKLLLSLDMMPPEILSLSSRELYALRAQSLDERITLQELGRIILLLNQRRGFKSNKKEKGSSDQKKELEGIKLQMEELEMKIASSGCRTVGEYFYSLFTDQSSQQNWHNTDEPVERIRKRFVFRKTYEKEFDLIWSKQKEYYPDVLTEGNYKKLKENCLYYQRPLKSQKHLVGKCRFEPQKRVAPKSSFDFQEFRIWQFINNLRITGGNRFRESLTLEEKLRAAGVLQDQQEMSVAKLKTELNLPKSYSFQKDLPQKIKGNTTNAKLQNALGKENFDSLSGDVKYKLWHTLYFANDEEWLEKYSQKDLKLTPEQTKEYMKINLEEEYGNLSVKAIRKILPFMKAGFDYAQACEEAGYHHSFDEVEDGKERELKDKIERNKEDDLRNPLVQQAVAETIRLVNEIIKEYGKPEAVRVEFARQLKWTRERREKYKSQNDEKERTRDTYREFLKHKLQMENVSKSDLLKFELWLEMEFSETELEKITRSIDMTEFRKFAKHVKPGDKQKYELWLECGRISPYSGKVINLHALFSPAIEVEHILPFSRSLDDSFGNKTLCEREINAAKGNRTPFEYLGENPYEWQKFLDRVKSFSEGKQAKFSAKDLPADFISQQLNNTAYIAKQARKKLKTVCPDVTVTNGQATSFLRRLWGLNTILNPKGENVKSRHDHRHHAVDALVIASTTPADIKMLSDYAKFDASGKLTLRDAPTPFLEFREQAKELLSTVFISYKNKKRLITTKKNKYIHSRKDCSTANISIRGPLHEETFFGKISNPHTGKEEFVIRKPLVSIETEKHIAKIIDPAIKALVIKHVQEHGGNIKSAMAIDLFMTSKSGKKIPVKKVRMQESSEDLIQLRPNENNKLFVSSGSNYLMAIYEKEGKRTFENVSFYEAVQRRLKGLPIFPIEKDGKAFLLSLTQKDLVVVYENDPDEIDWENKAQLFESLYLVRKFDRNGNICFAKHNLSNVNPDHPKDYPSGWVLKKSSNRLRAIKVRISITGKLIRIKRPAATKKAGQAKKKKDYKDDDDK

SEQ ID NO: 545 - protein, 1084 aa, synthetic construct
MAPKKKRKVMENIAISEDLVLGLDLGVSSIGWVVLDKKNKNEFTRIVDSGVRIFEAGMDGDISSGKADSHALARRNARQIRRQTQRRARRSRKVMYRLQEMRLLSEGTVSDIIPPLDKELAAKYQDVFDGSKELTLSNILPYWLRKRALDEKLSPYELGRVFYHLSQRRGFLSNRKSAARDNEELGTVKEGINNLWKEIEETRSRTLGEYFTTLNPHEQRIRQRWTHRDMYRQEFDAIWASQKGYHDCLTQETYKTLSHALFHQRPLKSAKHLVGKCSLEKSSRRAPYASLEAQEFRLISMVNNCTVITPDGEIRPFTDEERNTLLEHLRTEGDITFNNAKKLLGFKARSTHFNLEEGGETRFVGNRVNASLKGIFGDKWLDFDNQKKNLIINDLRCVRQSLCLFERGINVYGLDKEQAEKFAELELEDSYCNLSRKAIKKVLPLMQTEKMTYAEARCKIYGESLQAGEPLNIIRPVNKFSDIRNPVVSRVLTETRKVVNNIVRKHGKPGRIRIELARDMKNSASQRQAIAKRNRANEGNRKKIADRIIANTNIKNPRRDDILKVQLADECDWICPYTGKQMCWNSLFGSSPSFDIEHIIPFSRSLDDSFANKTLCDSHYNRNIKKNRGPGEYVQPGSDQWDTIMGAVSRFSGDKKVTAEKLRRFQLTTKHIEELTEEFPSNQLNDTRYASRLACEYLGELYGGQVDAEGIRRIQAAKGNITYYLREAWQLNHILGDGVKNRDDHRHHVVDALVVALMTPATIQRLTNAAVQNYERSTNKGRFKMPKMPWDNFWEDAKNAIDDIIVSHRVNHKVNGPLHQESNFAPVSVIENGKVVNETHIRRELAKLKINEVNKIVSSVVRSAVKAKLVELDTDDPAKAFSDPANHPCMKAKDGRMIPIHKARIKISASPVKIGQDRRERYCTTGSNHHMEIFAILDDQGKEIKWDAAVVSTLEAMRRKAKHQPIVNRDHGPSTKFKFSISPGDTFCLNKPKFNMPKLVHIRCVPESQQIMFCALNDARKQADIKKAKEWFSSKVRPFKELEPEKVIISPLGRVWTANDKRPAATKKAGQAKKKKDYKDDDDK

SEQ ID NO: 546 - protein, 1091 aa, synthetic construct
MAPKKKRKVMTKSNWNKYRLGIDLGTSSIGWAAISLDERDNPCAVLDMGVRIFPDGRKPTDESSKAVDRRIARGQRRRRDRYLKRRAELMQALVDYKLMPLDKNSRKELEKLDPYALRACALDSPLKPYELGRTLFHLDQRRGFKSNRKAGNEDESEEKKLSAAIGEMRRRVEESGARTLGEFLARRHERRETVRARTDLGIYPDRAMYESEFDAIRAAQKPHQRLRPEQWDRLRDIIFYQRPLRPVDPGLCSFEPGEKRAARALPLFQEFRMLQELNNLTLQVGAEPDRPLDERERERALIRLRSGKGIDLQRPTKSLDLPSGATFNLSRFGRKAVKGDETTFRLVKDELFGVRWIGLSLQLRNEIVRFLLETEDPDDVRRKAAGEWGLNEASANAVANASLAPGYGNLSDKAIQKLLPHLQQGLVYSDAVIAAGYTHHSDFRNAEAHDRLPYYGKVLVRDAVGADPEKNPEKDGEPARYGRIGNPTVHIGLNQLRRVVNRLIDAYGKPQDIVVELARDLKMNLVQKQQLRRQQQAGFRRNEDFKEMLKSAGIPVTQHTLHKLQLWEEQGPPQARVCPFSGAHLSFAMVVVSNQTEVEHILPWSRTLDDSPANKVVCTIKANRDKDNRAPHEAFSHSPPGYDYQAILDRAANLPGNKRWRFQPDAMERFEDEAGFLDRQLNETSYLSRTARAYLAYLYDEKGEGRVRVRAAPGRLTYLLRRGWGLEGMLRVTETGEIVRKQRDDHRHHAIDAFVVANTTPALLRRFAQAASSKHGNVVERLAALTPPPWEGFDRDHLRAFLNRLVVSHKPDHGKRGVMGKTTGQLHNETAYGLIELSADGPSKVVTRKDVSAFKRRSDLDSVRDPALRRSLQEPWDKAGSKPAEFAQQAANEGVLLNGRRQRVRRVRVVENLRVVPVRDSEGRPYKGYKSDNNEFAEVWRMRDGRWRIVVVPTFHANQPDFDIEKFRPSYRGRIDPTAKRLMRLQKNDMGALGEGPSRRIVKVRQVWAGTVILDDHNEADVDARERRGEVDRNKNSYSAKKLYERDFRKVGIDEIGRVLDPGPPKPKRPAATKKAGQAKKKKDYKDDDDK

SEQ ID NO: 547 - protein, 1107 aa, synthetic construct
MAPKKKRKVMRKYRLGLDLGTNSIGWCAVQLDFEGRPSDVLDAGVRIVSPNEEAGRDPQSKTSLAATRRQFRGQRRRRNRFTRRRDRLLDLLVRAGLMPQDAQARKALERLDPYFLRQEALDRVLEPGEIGRALFHLNQRRGFKSNRIADSGDDERSAMKLAVKALEDRLESEGARTLGEFLARRHGRDRYGRRDKGAAARPVRFRADTDGGKALYDLYPTRSMVEQEIDAIWHEQKKHHPRLLTDELLGKIKRIVIEQRPLKDPIAGNCSLFPSEKRAPKAHPLYQRFRIMQDACQLRVIRRGQAERPLRVSEFELIVGVLLKRSSRIVEFEKLRRELKLPDDARLNYERSGRKGFQCDETARVLAAKRTFGAAWRRLDLDRQVEIVERLLEDQDEVALCDWLQAELELDAASAEHVSGIRLPQGHGRFSIAALRRLVETMGRESREAHDPATGEVYRRPLTYDEAIECLGYHHSDRRPGKLHERLPYYGKVLEEHVIQWPNAPKGSHEAIGRVSNPTVHIGLNQLRLVVNALIDEYGPPEDIAVELGRELKLNKERKERLDRQNRENERKNNEFRDTLSELGLADTYDNRMRLRLYHDLPALSRICVYSGRPISVSMLFSGEIEIDHILPYSQTLDDGFANKVLCLRKVNRKKRNRAPESVWTGKELADICERAESLFPKKAWRFAPGAMQRFEDEGGFLARQLTDTQHLSRLAKAYLENVCRSVRVFPGRLTAMLRARWGLDGLLSDHNRKNRNDHRHHAIDAFVIACTDLGLLNRIANASGKAEELNLERLFPKDAFPIPFEGYHKALDARLQMLVVSHRPDHGLRPGAGNDVHMTSGQLLDGMAFGQVDEVVDGKRYNLVRRRPLRELTAPMILRIRDHGLRNELAMVAKDAKLSGRRLEDVLLEFGTARDIRSVRVLETKASVREVRHIRSLDGFGFRKAYETADNHSIEIYRLPNGKWQGEGVTVYDANRPGHEPNWRKTYPDARLVMRVHRGDFIEADLGEGRRVYRVVQLRPSANKVFLAQHNEAGSLQKRHKSSTEEDPFRFMMPVYSTLKTAKARRVRVDPIGRVHRVKARRKRPAATKKAGQAKKKKDYKDDDDK

SEQ ID NO: 548 - protein, 1279 aa, synthetic construct
MAPKKKRKVMKNKNKNPYILGLDVGSNSIGWAVVDCIKEEGDHKGIYAGYKPTSLRALNSRIFLEMVEAKTRVPKNQKRREKRGARKRRSFYKRRREKLVRILIDKRLLPEDYRQCPEKTLNQIDRRYGERKVGKHWSKTWSVTEKAHCSPYAMRNFALEENLEPFEFGRLLLHLQRRRGYFSNRGAKYIELIKHLSLDSPEDGQESMSVEEKKETGKVLQAIEKLHEELEGSTLGQFIWQKSQKHQKPPHRITLFEFEKSRTHKSETRIERLQFRAKREMYEKEFDAIWEKQSNFHDLSGQKHEIKHATFYQRPLQLQKNAVGNCNIYPHKKRSALMRLEFQEFRTLQMINNLKVDGNPLSGEQRNKLWDAANDPDKLNESGRIPWKEVARILEIKRATLNYETNEDGAGKTGLIGNKTAKAISASIGANKWRELGKDKQIKLVEDLQTIHNKKDLYYRLVTHWKFAPYQPGDNKKEKGALGLTMDEELEDGYGKHSLKAINELLPHLRDGLDYYKAVEKIGHRESITPNQRKTEDDYVLSVADVPNIANPVVQKALYEMRRVVNSIVKRYGKPVIIRMEMAREMKSSKKHRAEIASQQKKNREDNEKAESEILDYWQNGKNPHIELEQLRNNRARVSRNDRSKYKMWKYEQDEKCPYCQRPIGPNQLFSGDAEIEHILPYTGFRQNYLNTLVSCRACNQRKGQQTPYEAWGSDPDQWERIEEFAKGKYVRELYGKQRRILEKKHSPETVDDFVERQLNDTRYIATASKTMLQKYGVPVDVNTGMATNELRHQFGLNNILPHEPDTDAYIPTGDKVDTATGEILQFSADKAKKSRQDHRHHAIDAFVVAMTDRAMLKAMVDAHQIEQDNKNPSRQKTREDRIRERRLVLPESWEESEELHSVLKGKLVTTVASHMVKRKVWGALHEETLYGKSSYDQSLDIEGMTTAILKRVQRVAEADTSNTDWIADEELRSMLADWSKEMLEKKPSDRVLPYWKGKELKKFDYQCPTVTVRRKLMDELGLLSGLKEEWKPGAKTWVADKSIHDALFKWLEEHGLTGKKGKEIKEVLTKVPPRVLNKKGEPSTPILNVRIARAMTDSYIKIANSYVQPGSNHHLVIYHNGLEGKNRERRVEMVTMLEAAKRAKSNKPVIDRNPPLEWDGEWHYELDLCVNDMVRCEDLDIFENDNFAPEHRASPWFRVQTMNSGGRNKVDLRLRHHSVSGTDSNWGLWRIRSLKNVRCRKEQIGNLGLLVDDSKRPAATKKAGQAKKKKDYKDDDDK

SEQ ID NO: 549 - protein, 1702 aa, synthetic construct
MAPKKKRKVMPEKPIISPISIDLGAKNTGVYFAHYQEGSSIENIEKEGKVYLLEKDKYTLLMENRTAARHQRRGYDRCQMVKRLFKLIWEKHFHLEWNKDVQQATSFLLNRRGFTFLTEEYDTEKLSRFPKEAYKLLPDELKENVACTDVEYDFSVKLKEWTNEGETKVKEIFEALIKEPKRITKRQVLIGRTKKLREYCEIRKKREKISDEKRKVLSRLSKWIWNEWQQNGVQGLDENFVAKNKSDDSEVEWTFPGHFDLIIYLNNQSRDIACQILDSLPGTASEEKELKTCVWNFKTEKFDLEKAGLGFDQPDNSGDSASQGQQKEWLKTHLHHLAFALHKTLHELESGGRHRSKYFEEVKKVLENPNHTHDYLKNFCRKLQSGCYPDLDKVNFANLIGHISNLELKPLRKYFNDKSHRNSDYWDETRLNELFDRWILREWRVDTGKDKEKADGKRGDYKNLQECWNDYKKTNPNTVIDFWLKTNPFFTIPPYQDNNNRRPPKCQSLILNPEFLNRKYPEWQDWLGELRKLPTVGEYLGNFVCQLRSLKGGGKSTYFSDKETEPKKKNGKPKSPKELKAGNQERRPLEALDARILQFIFDRVKADDPLKLNEIYSQAKKWRQEQSTEKEKQDAKCKLEIAIGESGLPNGLKTNRDYDNKGLLQEKTFLHLVCKYYKQRQRAKDGRLFIHPEYRYVKGRGYENTGRFDDRNCLLTYCNHKPRQKKYQSFHDIAGVFQVSLEELKEIIGSTDDSEVIKWLKSFKAERSSLEGICERAAKAQKEHRGFLKENMRKAVSAHSPGADDRELRNLDQNIKALSHELAKSLFGQRIQQDDPRAQKFCSVFSFAQIHNIAFKDRSGNSNTCAVCGADNAHRMQMTENTGSKEGSAKAQRLPAIPTRLIDGAVMRMARITGGAIAEEKWKKIEKSLKQEKKVRVPIITESNRFEFEPSLKEIKGKSLKDTDKLSREKGQEQLATNKDERIKEASLGICPYTGKNLPENRGDKDHIIPRSSKRGTLNDEANLIWASDTGNKKIKKDKEFSLRDLKKAYKQKQFGAKDDQEIKQWIIEQIGDGEGENFSFGKYRSFTNLNQDQQKAFRHALFLKGEPLREKIINAINNRTRMLVNGTQRYFAEAIANSLNKKARTIGKQSLLSFDFFGVEAQSNTRGDGIKDLRNEYEKTGLIGQEYAKKEGQKQKPYSHLIDAQLAFAITACAHKNAGGLRLTICDSLNLWPLDKDTGEIFEKTIFGSIQVKPDEMQPLEELQRRKVYTVETHHRKIITENRKPSINYQIHRDSICKESFFPILKFKDDKYKKGFDQSNCADFKADQFSLLLENSFVRQTSSNAHYEVWNILKKDCQQFLMKIGSVGANSQERKIAKILDNLTYQTIKKPLEKVLDTSRLKNKPPQTVGDALACWPECIKEKDFHKDSVILPAYYEWMKLHRHLQEADKEKTFYEFVKNCSLFKNTQSTSDHNKVRKVFSLPVQISIGNIRLQRKSWDKTQVIQIVAEESLAKYGYDGKGRPHTIISKNSVPKKHYTGIPDNWNLEPLEWKRVPVEKITLRTPDIEVKDAKIKNKDAGRCMARLKVSSIKDLSLPQDKRDWKGKVICHESEEEMKKAQDRDKKDNHHCLSSQFKWFDTPFTLQNDRREVEIETSPDGKVITFTISKSSKVKSWLSAKRPAATKKAGQAKKKKDYKDDDDK

SEQ ID NO: 550 - protein, 1393 aa, synthetic construct
MAPKKKRKVMNIRKVDNYAVGLDIGTNSVGWAVVDDKGELLKFKGKNTWGSRLFDSADTAARTRAYRTQRRRYDRRKYRISLLRKLMETDVFALDENFYHRMEQSYLWHDDRDFNEKWVLFNDANFDEKKYYETFRTIYHLRDALVNTHEKMDIRLIYLALHHMIKYRGNFLREGDLTAADSNITAALGEFQIQLMDYCERYGIVCGTVDLVAMAFAIQSGSEKRAFRAEKVQSALGFTGEWKNIGKQLSRAMFGYEVNYASFFEVEGTEAKFALDAEEKVEKFVDEVLPEDDAPFFESLRSIFNAYLLAGILKDIPEGKTISYGMVGKYEQHKNDLDTLKTLVKKYVPGRYDEVFRGAKYADGAYKRENAEGYTAYILSEKKLSKENFYKYLKSIFADSEMLPEDADIWVTVEAAMEEGNYLSKLRTRENGAIPHQLHLEEMRKIIENQGEYWPTLRENQEKIEAILTHRIPYYVGPLGKNGVPNRKEPFTWAIRVEGQEDTKVTPWNFDKVIDKDASAELFIRRMTGKCSYLLGKDVIPRNSLLYSEFCVRQELNVCTIARDGERPVRFDCADIDRIFNEVFKKQKRVKVDMLRDWIRTNLGYMNNVIQGTQKEGEFASSLTSYCDFTRILGHEPESISDREMVEQLITWITIFEDKKILKRKIEQKYGTLGQDIFDKEQIKQICKLRYTGWSKLSRDLLEGLKADYNGHRVSIIGILRDPEGARPQNLMEILADERFGFSALVEAENQEYLSNVRGAYELENIPGSPAIKRGINQSLKIVDEIVSIAGHTPKKICVEIAREEQGKGKGSRTKTRYQMLQNAYDSLSDELKDADISDLSIKLKERSSELDKEKVFLYFLQMGKCMYCGKSFDISSLNDYHVDHIVPQSFIKDDSLDNKVLVCRHCNEEKLDTYPIPESIRRRNLRLWQAMQKADLISKRKLDNLLREDLNNRQIEKFINRQLVETRQITKHVIELLKTRYPDATVEAVKAELTHDLRVEYDFPKSRVINDYHHAHDAYLACCISRYVSIRYPSWEKELDYSAFKKFSGSEKGQRKGCKGFIVGTFSMNGFDKETGEIFRDIWDADEELLKMHRCLTYKDCFISRKTEELTGEFWNATVYSRRVETDKAIPLKKNSDPKKYGYYQSPNSAYYCLVTYTETVRSKAKTVARLVGVPVNVARHVSASGDLRTWLDTQYADVVIIKPKIMKYQKISWAGCEYYLTSNSEMINARQLWLPESYVVGLVECEHAIKKGQIDLAVYDETFIKIYERVIDTTAAAYPRYSGLLQKIEHVSDSFYSASIEDKLSRINELLGLLHANAGCGLVTNGLTPAAGRMMNINYGPAMLEGEIEFIDTSITGMYERRYSLGVKRPAATKKAGQAKKKKDYKDDDDK

SEQ ID NO: 551 - protein, 1184 aa, synthetic construct
MAPKKKRKVMLNKVGEIQKRSKKPCPISHPEFELFRAYQFINNIKYGKHPKLTDDEREKVLALINKKDSNFDFANIPKELKLTYEKFNFEDKAKVPANPTIKKLRPLFDLKVWEKSYEEIWHCFYFYEDNDMLFKKLKKDFAYKKDVETIAKIKLKEGYSNISLKAIRNIMPFLKKGYQFDRAVILGGIKNAFGKRWDYFTEYHDKIEREIISILNEDNKDGEAIDKIRDHLSSPVFAYGFKKDDPYFTYLYHHSQNVEVSDELDDYLPQVENLRNPIVQQGVNETRRLVNSLLRKYKREYGQDFRFERIHVEMGRDLRNSKKQRQQVSISIANNEKKNNEARERLAEYGLKSSRENVQKFLMYKEIEERNGKAQCPYTGKTIGITDLLGESNAIQIEHIIPLSISLDDSFANKTLCEAHFNNEKSEKTPYEFYCINPDVKLWGASSWEEVETRAFRLLPYAKAKRFTSKRKFEESNFIERQLNDSRYIAKKTVELLSCICKDVRVMPGQLTAELRHLWGLNNVLSPIHELGKHEINIDETKSTPYFVVTDKNGNTVSVHKKYNDVPVTKESEILLPGYNEKSKFTTKYFDINIEVPELSDGKYWAKLQVNSPIKVIPKYIDKPLAGEDQIILKGRVEKGTFKNDTVGSITNNQEDGNYWVVFDIVKKSFVAPEKKKTPKAKKNQILLYGNVYNGEFKCYIYRCNTNLPDGKFWMLIDYKPENIEFIKAVNSKPELNHNEICINATADDNGLLVADVDPEYKIKDSFASGKYYMTLKIEKIHPELYPIENVLPKVEKDQSIIEGNIWVDKYTGDIKFDPKKNRDDHRHHAIDAITIALTEQGFLQRLSTHNAQRKSKQREKLDSTEKFPEPWIGFFNDVKEKAKGILISHKKDNKTLTKNRKGYSVRGQLHKENVFGKRKAPQDKVESYHRRTKITELQNDKHVGKVVDITIKNLIEKYLSDKCGVNIENTKGYKIPKDAFFKYGEWQLFLPNKKGDPVPIKKVRIRESISNALPLKSNLNQYVNPRNNHHVLIYSDSEGNLCEDVVQFWTVVERRLQGQPIYQLPDGGKEIMATLEINDMFLLGLSTDEFELVKSDNSFLSKYLYRVQKVSSSYYTFRYHLASTLINSKEEFSIRSFKAWQDTNPIKVKINELGEIDRFKRPAATKKAGQAKKKKDYKDDDDK

SEQ ID NO: 552 - protein, 1119 aa, synthetic construct
MAPKKKRKVMTWRLGIDLGTNSLGWWAFSVEKEGPRWRVSDSLDGGVYIFPDGREPAKKGRVGDSNAVERRLARSLRRNRDRRKTRLRAFMRDLVALGLMPVSRQERDELFQARKGEDSDRSNPYRLRAEAVDRPLGPYKLGRALFHLGLRRGFKSNRLEQADKDGGKLKERMDELRNTLNGKTLGQFQWARFQVERERQQSGEKPSGIRFRGEGEFYPDRAMYAMEFDAIRKKQEPHHSLKPDDWDRLRNRYVLFQWPLKPVERGRCQFFLEEARHWRDTPIGHDFRIYQELNMLRWVDADHQEHPLSAGQRSAVLQLLLTRKSEVKFDSLRKQKCQDRTLLFPDCTRFNLESKKRKGLKHHAIGATLTENPKLSPLWQRRCSDKGDDGLLDDIFEALHEEDDTDSLGSRLAEMGLDAEAVQELIEWPRLSRATANVSRRFMEAIVPIMRDQKLLYWEAVSEVKDRNGAPLRHSQQPEGGHYDTLPYYGEVLHGSTLGANPAADPQTAPEQHFGKINNPTVHVALNSLRRVVNTLTERYGERPVEIHVELSRALKRTRTERDEDAKQQADNQKENCRIREELTKHGSAQPSARDIKKYKLWEELGKDTLARCCPFSGQVISCAQLLNGEAEIEHILPFKRTLDDSMANLTVAMRWANRLKGNKTPYEAFASNAYAAKGIEWEGVRTRADRLPDNKKWRFGPDAMARFEGKPGSGFIARQLTDNAYIARAAKRYLNCLKGVKQIVPNRGGLTALLRRKWDFNSILSDTAYKSREDHRHHAVDAAVIGLADRAMLNSVSKQTARGADDRVHIMVPELPEPIEHAIRARVPEIVVAFKPDHGWQGAMFKDSAYGFIPLEQRDPDMLEHNLVVRKSLAELTLKECGFVQDKKDKRIRYVVGCICDEQIRSSVGAYLTQAAENGEDLKKDAILKKVLARFGAEHGIGRVRILVTDQTVKPIASAPYKGYKPDSYVCCDVWRCPKGKAGKWQHERYEWRGVYWAYAETPNGVPAPQTRKPHPAAKLVARLYKNDMVAYEEGEQIRVMRVAGFSTTNNKLDVVSHSAADPKQSFVAINALGVAGLRKLWVSPDGRVKGSTRKRPAATKKAGQAKKKKDYKDDDDK

SEQ ID NO: 553 - protein, 1438 aa, synthetic construct
MAPKKKRKVMKKILGLDLGTNSIGWALVNESENKNEFSSLIKTGVRIIPLSTDESNDFEKGKAISINADRTMKRSTRRNLQRYKLRRKQLLNVLKGNKLIDNKSVLTEIGPNSTHSLLSLRAKAANEEISLENFARVLLAINKKRGYKSNRKAKDDTDGQAIDGMHIAIQLYEQNLTPGQFVYERLKQDKKNIPDFYHSDLQNEFDAIWEKQNESYPDILTIELKESLKNKNKGQSWKICEKPFNIVGIKQSGNTQQKKLELYKWRAQALKEKIDLEHLAIVIQEINSQINNSSGYLGEISDRSKQLYFNRITVGEYLYEQIRNNPHTPLKNQVFYRQDYLDEFERIWETQSKNRKDILTNELKEQIRDIIIFYQRRLKSQKGLISICEFEGLDIEIEIDGKKKKKTIGPRVIPKSSPLFQEFKIWQILNNLKFENIETHTIYPIPELDQDLSIRKQIFDVLNTKGKLSPREVLNTVLENPEKWKVKNFKELEGNSTNQKLFNIYSKIVELSGHRINNKNLKESYADIFKTIGINPDVLEFDAELKSNLFEKQASYQLWHLIYSYEGDNSETGNDKLYKLLYNKFGFEKDYAKLLINISFQNDYGNLSTKAIKKILPYLKAGHEYSEACLLAGYNHSHSITKEDNEKRPLDDFLELLPKNSLRNPVVEKILNQMINVINAIIEQYGKPDEIRIELARELKKSAEERAEMTRQITKATTEHNKIREKLKEIYPFNTGIRITQNDIIKYKLWEELAFNGYKTIYTNSYVPIEKLFTKEFDIEHIIPKTVLFDDSFSNKTIAVRDFNRIKSNKTGIDAVAEKYGKDSTEFKRYINTVEKLYENNKISKAKYKKLLMTADEIPDGFIERDLRNSQYIAKKAQEILRKIVKTVTPTTGNITSKLREDWQLINVLQELNWEKYAKLDLTDFEINKEGKKIPVIKDWSKRNDHRHHAMDAITVAFTKPSLIQYFNYLSARKNEKHKKHSNIYAIEQKETFVNDKNKRLIKPPIPIEEFRAEAKKQLESILVSFKAKNKVVTRNINKTKKKSGENKKIELTPRGQLHDETIYGKSCRYTTIEEKVGSKFTKDYINNVAIKSQKEALLKRLNEFDGDAKLAFTGKNSPSKNPIYLDEHQSVKLPEKVKFVVLEERYTIRKEISPNLKIDKVIDKKIREILNKQLKQFDNDPQKAFSNLEENPIWLIKPTEKNKWENPDKPKSHELGIPIKRVTITGISNAEALHNKKDHLGNKIADNNGKVIPTDFISPGNNHHIAIYKDEDGKLYEDVVSFYDAVTRVNQGSPVVWHTHPEHPDWQLMFTLKKNEYFIFPDPEKGFNPSEIDLMNEENYHFISPHLFRVQKISSKNYVFNHHLETQAVNNDTLKNKNLAKTTYNFIQTPEKLKELIKVRINHLGQIVKIGEYKRPAATKKAGQAKKKKDYKDDDDK

SEQ ID NO: 554 - protein, 1098 aa, synthetic construct
MAPKKKRKVMITTNGMKYRLGLDMGTNSIGWVAVKLDEDGRPCGVLGMGVRIFPDGRKDSASGDGPSNAEQRRMARGQRRRRDRYLNRRADLMQALIDCGLMPTYEAERKSLEKLDPYELRACALDMKLPAHHVGRALFHLNQGRGFKSNRKTEKREKDTGPVKEATKRLSDQLSASSARTLGELLYRRRSMDEPVRFRNRNQGTNLKAEYELYPTREMILDEFDKIWKTQKKHHPGVMSNDAKKRLMGIIFRQQDTAPPPVGKCTLDPASDDGDAEGFRCAWSHPLAQRFRIWQEVRNLEVQETGLRWRRLSKEEGDKVAQALLEQNTVSFNKIRRILELPSGIYFNLESEKRQKLMGDETAAKLSHKDLFGEAWRKLPLDRQIEIVDLLVGDKSDDAAKEWLTRHTDLSSEAAGRVVSAFLPDRHCRLGLRAIRRLLPHMEGGLDYPSAARATGYDHARAPTGELSPDGRLPYYGEWLKDHLAGSGDPKDPPDKRWGRYPNPTVHIGLGQLRRVVNALIGEYGTPHQIVVEVVRDLKRSKKQRENIRKEQAANQKKNEARDREIRDLALRPSYENRLRLRLWEELNPKNACDRRCPYSGQPISIDQLFSAEIEIDHLIPWQDSLDDSPANKVVCFRGANREKGKSTPHEKFGKTPEWKGIAQRASKLPPNKRWRFGADARERFDGQGGFLARQLNETAWLARLSKEYLSAVVRPYNIWVTPGRLTSMVRYKWGLNELLPGYDREAKKRTDHRHHAIDALVVAMTDRSLLQRMSSAYDETRSRIIVPSPWEGFREGVQPFLERMVVSYKPDRGTPGKRGSTSGQLHKETAYGLIEFSEDGPSKVVVRKKISEFKKRSDIDTVRDATLRAALLELWDKVHWEGGKADDFAKMAGTPSALGGGLQPVRGVRVVENMNVVAIRDKDGRPYKGYKPDSNTFADIWEMGDKSKSWKIVVVSTFDANQPDFNIEKFRPTTARGKHRGKPDPAAKRLMRLHKDDMCALGSGSDRRIVRVRKFDSGTIVFDSHNESNVDARERKGEMDRNKSIYSAKRLREEGFRKIGVDEIGRVRDPGPTKRPAATKKAGQAKKKKDYKDDDDK

SEQ ID NO: 555 - protein, 1116 aa, synthetic construct
MAPKKKRKVMAANDMRYRLGLDMGTNSIGWAAVRLDDDGEPCGIVDMGVRIFPDGRNPTDKTSNAVDRRMARGQRRRRDRYLKRREDLIGALVEYGLMPEDADQRKRIANDNERFDPYELRAKALDGQLTPFELGRAIFHLDQRRGFKSNRKSESGDNEDEAQKTRSDISRLRESMEESGARTLGEYLAKRRGKGKSVRARPGEGLYPDRAMYEEEFKRIRAAQEVHQSLSAEQWDKLREVIFFQRPLKPVDPGWCLFEEEEQRAAKALPLFQEFRMLQEVNNLKIQDGVEDRFLNVGERGRALRRLRLGSNINLNVDKPLASLGLPSGAKFNLAAGGRKRVTGDETTAKLAALPKKATTKRPATPGMFGKRWLEFSLEERNEIARFLLDTEDPEVARERAVREWGLSDAQAVALSNVSLVSGYGNLSEKAIRKILPHLEKGLGYSDAVIAAGYPHHSDFRNEEAHERLPYYGEILTRDAVGADPEKDPEIYGEPARYGRIANPTVHIGLGQLRRVVNGLIQVYGKPEEIVVELARDLKMNRADKLNYQRSQKEGGERNERFVEMLKSMEEPVTHHVLRKLRLWEEQGPPQNRICPYTGKQLSCEMIVTARTEIDHILPFSRTLDNSVSNLVVCMAEANRVKGNNTPYEAFGQKNPPGYDYDYILANVADFPYKKRRRFEKDAMDWFEGERDFLDRQLNETQYLSRTARTYLAHLYNEKAEGSYRVFAIPGKMTALLRRGWGLNGMLSESGEEQTERKQRDDHRHHAIDAFIVANTTQRLLQKFAREAGSSWQDAAERLAELTPKPWDGFGRNELRPFLDKMVVSHRLDRGTRGVMGKTTGQLHNDTAYGIIKTSEDGSSEVVRRKPLSDFKSKKHIEAVRDPALRDALNQLWDDLGGKATEFAEHAERKGVVVNGRVQKVRRVRVVEKQRVIPIRDSEGKAYKGYLPGGNEFADIWQMRDGSWRVVVVPTFDANQPGFDIEKFRPLTTKGKYKGKPDPSAKRLMRIQIDDMGALGEGSEQRIVRVRKMSNSKSGALVWLDDHNEANVAARVGKREIRDMKYSARQLHQHGFRKVRVNEIGKVIRDPGPYSSKRPAATKKAGQAKKKKDYKDDDDK

SEQ ID NO: 556 - protein, 1124 aa, synthetic construct
MAPKKKRKVMVKYVLGLDLGPTSIGWAAIAIDENGNFLGFLKISDSKDGLHWIPAINSRIFPMPYVEKTYCAGNKETTRNKNRRDARGAKRRYQRRSQRLNETYCFLHERNILPERNEYEKLLSLDPFEIRAKALEERIDLHHVGRAIMHIAKRRGFKSNSKLGGLIDVDTDNKRKKKDKSKITLLNTYEGKTIGQICYEKHKDDICTAVRNKGEMNIWQRKDYIDEVCRIWKCQQQYYPTILTDDVLEDLVSEDGSKWLLFSQHSYKLSARKQRKYIGKCSLWKEKLRCDKSKRVAQEFVLLQTINYLEIYDSYGSKIECGVSKEDKQKILEYISSFEKGKKYSQIKKHLGYPEDWRFNFEDVEEDNSLPGIAVDDLIRVIFGERKGNKYVQIVDYSDREAVWEIVLLYIDEEISYNELRKQMVKFDVEVPDEDILNAKLSKAKVPDGHVKYCEEIVKILNAEMLKGINLHEAKQRVCKRLGLKNNSRVLSKLPIPDRAHGFETTNPNVKVVLHEVRKIVNQLIKEFGKPERIMIECGRSIKANKKQREVIKKKQKDNNTLKKSVREIFDVNDQIPAFIKCNKPGWAIKRYILWQQQKGMCPYLDSSKKQIPLSKLFSSEVEIDHIIPREISFDNSLNNQVVCYTNENRNKGLNTPISWLKETNPEKWVNTQNAIKHWKELTKREKITIDGEEITLEPNRNKWERFFVNNKDVHNKYSPKNLLNDNSYIANEVKKYLLRLYPSENQQGRQNVDTTKGMITSELRKIWGVNSILRKDDIDQKNRGDHRHHAIDAAICAVTTHSEIQKITRELQQAFPETDYGKIKISKPWSGFERDLKEVIDSINVSHRPRRQVRGSLHGDSFWAKDSNGKFVQRKKVKDANVSTVCDEKVRDLIKKWKESNQSEYPMLPNNNHNVNNGEPIPVKKVKCYSGKNENQFIEIRPGKYVEKPENHHVELFELEENGSTQIIAKIWNTYEVSKRIANANRKYNKLAKSGEKLNMTNCIVIREHPEYSEATFKFSFSKGDIIQMDSKKGGRAYYRAVSIGENDYWFWELHIASNEKPKADDLDGHRLRSPNKFLELNAKKVTVAPLGRVRWANDKRPAATKKAGQAKKKKDYKDDDDK

SEQ ID NO: 557 - protein, 1648 aa, synthetic construct
MAPKKKRKVMSKRQSVISPISIDLGAKNTGVYFAHYSAGSSVHDIEKWGRVYRLEKDDYTLLMTKRTMARHQRRGYKRRKMVKRLFRLIWCQEFGLKWDDSVQQTVSFLLNRRGFSYLTDEFHTEFLDEFPKEAFCELPENIRNELHHYSKINESLFEWKQLGANHVIDLLSELSEKPQKIKRRLVVISRAKELKTHCESRIEGNEIEGNKKRNSKLRKLSKWVVESWVSEGIRCADAIDEKANVVDMILYLDQIELEKVKTMLESIPIDEHESEAKELRASLWNFDIGKFDLEKADFEKNFVRSHIHHFAFALNKIKDELTSGARHRSKYFEEIHDVLSRNNHTHRYLAEFCTKLQNCEYTSQNRTPITVASLSKLIGHLSNLELKPLRKYFNDVQHKHEDCWDGERLSELFGRWILKEWRVDLTKDRDKAEGKRGDYRNLRDKWKSHGSGVVDFWLQEDPHLTIPPYQDNNNRRPPRCQSLVLNPVFLDEKYERWQYWVSELTSLIEVNEYLKDYQTDLGSLKSGKGRFYFSDDQLAGNRKIDAGRRTRKDLDARVLQFILDRVKASDPLKLNEIFSHVKKIRQLQSTPEEKKIATRKLEDSIKCSKLPDELKTKRHYKNEGVFSRGSFLHLVCNYYKNRQKARDGRLFIHPEYHYVENCGFTRTGRFESSTHLLTYCNHIPRHSHNQLVENLAALFALSPQQLMQRTNSSTNKDLLDWLERIKGLKSNCEKAAKEQKVRRGRLKEDILATQEDSKSELGKLKDKSINLSIQLYDQLNCKVGDSTSKDPVASVFLLAQINNIAFSDSGGKSKTCAVCSLDNARRMQFASDSVHAQRLPAIPTRLIDGAVMRMARITTHAIAKDKWETIEDNLKKGMTVRVPIITESNRFEFEPSLNALKGRKSDPNTSRVYSKQDRIKSAAGNISPYSGETVGDEGDLDHIIPRSHPEWGTLNDEANLIYTSKQDNRDVKGNRIYTLSDLHENYKLTVFNLSESTEIANWIETTIWDAEKEDFKFGQYFSFSGLNIDQQKAFRHALFLENGNPIREAVLGAINHRAKTLVNGTQRYFAEVLANELHKKAKAINKHHLLSFDYFGVEAQDNSRGDGIHNLREDLVKFYRQDLDVFSKKDDEPQEAYSHLLDAQVAFCMIVDAHRDDGGLRIDLEDIGIWSRVDRNTGEIQTGKNRKIYGSELFDAIEVKPNQMRRINLKRYPLEQNRFSHRMIHRDTLYAEHYLPILVDRETSKIRIGFDWKNSFELNESITNRQNLYFALKFNPKTKDMNLTKDESFEDLVNRLEQIGNWKKSGTNFLCLPLRKQMIHNYYIENFNTANGISGKDQGSGFKFLRNKLAYRTERKRITTLKEAKIILDRESNFQLPKSQSGLVLPVKEEWKKLVAAWKRKPESTEDSEFLSRYFIKNPDNKPSHEKFRTEFSLPIKTPHGKILVKRNSWDDSFIFQILNDSDPSGAKAFLPVFKNGKLAKLLSNSANSSNVFLFTQENYYSEATGEIRSFDPDKWYAVNLSENEKVQGIESLEYQIPDNTRPVIRVKFSESRNGDDVGEILKSSSLHPLLAPRLPSFKDKDKENLAIQQLLEELKEKLSQGKPLEYKGASFSREIKRKLSEILKRPAATKKAGQAKKKKDYKDDDDK

SEQ ID NO: 558 - protein, 1053 aa, synthetic construct
MAPKKKRKVMAYVLALDIGIASVGLSGVDYPNEDILFCNSHVFDAAENPKNGASLALPRREKRGQRRVIRRRAGRKKAVRRLLSQHGLRDIDVIDASKSSNVLCVWELRKEALERLLNDAEFVRVLFHIAKHRGFQSNRKDQSERNDIEGMKVLTGAKELEEAMIRSGRETVGAYISTLDKKRNGDGDYSRMVTRDLLHSEVKYIFDAQRKYKNDKATQELEHEYAAIAFTQKPLRSSAWMVGDCTLEPAEKRAPKHSYTAELFVLWSKLNNLKIRTTGKGERFLTPDEKNKITALVHAHKTGVTYTRLRNTLSLEEAERFNIGYRKTKKEQDSWEKIRKATEAGKFFVLDGYQTLKEVLADSDIDWQNRLQNKREQLDEAARILSFYEDEKEIRDLLSQAGFSEKEQDRLLKITGFSKTVDLSLKAIRKILPHMMQGLTYDKACDKAGYDPHGAAGGQKGDKLPPFEDIRNPVVNRALAQSRKIINACIRTYGMPETIILEFGRDIGKSKQDRDKIERTIKQNEAHREEAKKHFIELTGQAEARGGDILKYRLWQEQDHTCPYCGVCISGDEFKDPLATQIDHILPYSRTFDDSYMNKVLCHMQCNQDKGNRTPFEWLGQKAIWDKVEALSAHLPKPKADRFVMEVLDEEGFKERNLNDTRYIARLLKSLLEKHLDMGEGNRIQTRNGRLTAHLRRMWGLQKSRDTDRHHALDAIVLACSTQSHVQRLSNWNRYEAKKGKAEPYAPKPWDTFREDALEAVSQIFVSRLPVRKVTGAAHEDTIRSQRANGEIVQRVKLAGLKPDMLERLVDKERNTALYTVLKERLDAHGGKPEKAFVEPVYMPCKDPGKQGPKINAVRIVTKEKSGIPINEGIASNGGMVRTDVFEKGGKYYLCPVYVHQIRKGKGALPNKVITGKEEKDWTVIDDSYRFLFSMHKNDLIRVVKKDGTNAFGYYRTTDRSGGTIKICAHDNDSSFGNKGLMKIGVQNLKSFEKYTVDYFGNKSRVRKEERNGMAYAADSESGQTLAVEKRPAATKKAGQAKKKKDYKDDDDK

SEQ ID NO: 559 - protein, 1121 aa, synthetic construct
MAPKKKRKVMKYRLGLDLGSTSIGWTVLKLDGKGEIFSLEDMGSRIFSDGRDAQSKKPLNVARREHRGARRNNYRKFKRKSELLEVLIKHNMMTTNREEQKIVANKNPYKLRKRGLDERLSLYDFGRALFHLGQKRGFKSNRKYDNQEAEKSNMKVAMADFKNKLAKSNCRTIGEYFCDKIENGERVKITVSNVGSKNSYSYVLNREQVEDEFQKLWVAQAKFHSELTEEIKNEIYHAIFWQRDLKPQEKGKCQFEQGEPRIAKAHPLFQLFRIWQEVNNLKIITFEGKKQDLTLEEKVKLVQKLSSQKSCKFSALRNEIFGRALANNYEFNFEKSESRDGLEGNLTFSIFRSEKCFGAEWDKFDLPTQNLIVEKILNEENIKEVEKNLVSWLSKTYDVSQEKAEYISSVSLPSGYANVSKKAIEKLLPYLEKGLQLHEAIEEVEYTINNYDGTLYDEGNLPYYGEVMPHHALFGNGDQNQIPEICYGKIGNPTVHIVLNQLRTIVNLLCKKYGAPKQIVIELARELKLSKKKNDEINETNEKNRKSNEKAVAFLAEHGLPKNKENIIKYKLWVELNAKDDKNRCCPYTGKNIGFTTLFSNKVEIEHILPKSRTFDDSYANKTLCFRQANLDKGNRSPYEAFGQNSIPEYNWKNIIDRVKENLPKNKQWRFYPDAMEKYEGENPIIARMLNDTKYVSKIAREYMQYVCGANNVWTIQGQLTAKLRHHWGLNSLIADDNNKNRADHRHHAIDAFVIACTTRGMLQKIFTQVRESRDRLIEKMPPPFENFNLSEMQSLVDNILVSHKQDRHGATKHIRKNLHAWNKKTFGELHKATAYGLYGATILLKNLKKEDLPYLIHNEHYPQLRDYLEGKIKSKDVPKIDIILRFNKTFDLYKSSLIDRIKKISLSIRRPITEIRSNEIVCNNYIREILSKKSNNSENLTKLGIIRVKVFDDSIDPKTVIPIYDKNGIPYKYFVSGNNYCLDIYMPNRGTNAGKWQMEVISNFQAHQKDFKPNWKIAEPEAKLIMRLFINDIVKYEDEEEKEIIGRVKKMDQHRAYIKNIRISDDTDGVSFSISKFIKTKARKVYISPIGELYEPKRPAATKKAGQAKKKKDYKDDDDK

SEQ ID NO: 560 - protein, 1076 aa, synthetic construct
MAPKKKRKVMPLVFGLDIGTTSVGFAVIDYDSELATGKVHRLGVRIFPEARDPKGVPLNQERRQARLRRRQLRRRRERRRLLSEHLCAAGLLPTRNSSEWECAMKRDPYDLRRRAFEGETLSPHEIGRAIYHLMQRRHFKGRDIDEVSDTADSAGDDADDKQATSARELTGQALKREGKTLGAWLAARGPHERKRGEHATRSLVEDEFDKVWKPLIPEPFRSLVRDVIFVQRPVFWRLKTLGRCRFVPEARVCPKGSWVSQQRRMLEKLNNLALAGGNQRPLDPDERQAILSRLQTQASMTWAGVRRALAPLYRARGEPGEERALKFNLQEGGEKTLLGNPVEAKIADIFGNEWQNHPRKQEIRDVLPHQIWQADYEEVGGQRVIILPKTERVSRRAAVVRNFVSEFSLSDAQASKIETMKLPSGWEPYSVEALQAMLPYLEEGVRFGELINGPDWEDWRAETFPGREQPTGEVFDRLPSPAQREESEHVAGLRNPTVARTRNELRKVVNNLLDLYGKPDLIRVEVARDVGNSKRQREEKATGIRRQELRRKAAREKLQQYGISEPSRADVEKWMLWEECGHQCPYTGDFISFDALFKTGDFDVEHVWPRFRSLDNSFRNKTLCRKDVNLQKGNQTPYEFFRGNQEEWDAIANRLANMKASKSRPGMPPGKIRRFLARSIPEDFAARQLNDTGYAARDAVTYLKKLWPDQGPDAPLKVSAVSGRVTGHLRRLWGLNNILADSGEKTRSDHRHHAIDALTVACCHPGMTQKLSRYWQEEDDPRATQPLLPPPWKTIRSDAEKAAASIIVSHRVRKKISGQLHKATVYGDTDEEVEGGRGVTYRNFVRRKAVEVLKNSEAPRFNGTRIIDIVDDGVRDIIRSWVERHGGDPSAAFVQGYPKRSRKGPEIRKVRLRVKQQIELMTKASTGFADLGNNHHIAIFRLTDGTIDYEVVSLLEASRRKERREPVVKRVRDNGARFVMSLSPGDSLQLTRNVETRLKIVTSVWSEGRVVLVDHDDAKGTTEFRPGAKTIVSNGGKKVAVDPIGRIRPANDKRPAATKKAGQAKKKKDYKDDDDK

SEQ ID NO: 561 - protein, 1101 aa, synthetic construct
MAPKKKRKVMSYILGLDLGETSVGWAVLEERGNKPVALKDAGVRVFPKGAEVDEKRGISTSESQTRRQKRSQRRIIRRRSDRKKALKNLLLSHALLPSDNEKQESLLQADPYEIRTRGLDTKLRPNEIGRALVHINQRRGFKSNRKSGDLKEEGILATSIGTLAKAMEESQARSFGEYLYRLDSGYDKGASKENTRERQGVALRNRGGGYEHLPSRAMIEDEFHLLWSAQAAHHPGLLTKDLKRAVEGIIFYQRSYAISEDRRASWGKKFVNAKMAPQLKHCPLFPEEYRSPAGTWEAQRFRLLKEVNNLEVLDEYGKGRKLDTAERKTLVDALGIEEKQTFVQLSKLIALPKEHRFNLEAGERKHLDGNKFEVQLIKGYYGKKTKKEKEAWLALDGDFKGHLRELVANVEDADQFTETAKELGLTEKQIEGLRTVQPTGNYLAYSYKAIQNLLQFLEDGLDEYHAIQKAREQGVIPPSNEPDEYDLLPLPPDLPNPIVTRALHETRKVVNLLIKTYGKPSRIVVELAREVKHGPKRRQSISRTIEENRKRNEKVKAWYREHGVLTPTRDDVIKYKLWEDQNHLCVYTGKTIDQEDLLSDQNVVDIDHILPRSRSFDDSYRNKVLCVTQANREKGQRLPVEWLGGPGNERFDKMLVRLKNMPSIGHDKFARFNQEKIDTEHAIARQLVDTQYISREAVAYLNQLFPKELRVGEKAVGTVIGKLTSDLRHVWGLNTILSGQEDLKNREDHRHHALDAIVVACATRKHVQELAKRSKWGQDPSEVPPPWKRFRDDVKHMVDSRKRTWKLGDQEITTEGMLVSHRAEKKILGGFHQETNYGPTRDPEWFVRRVGVRSLTGPMIKGIRDDAIRRILTKHCEENGYNPEQDGRTIPPKVFQTLPTMPSGVPIRSVRIVERKQKGIEVFGGKNGIAPRAVLLGNNHHLEMVERDNNGVKEMLVCIVPTLEAARRSRIRKEPIVQRDHGEGMTFKLSLARKEAVVFHKNGKHHLCYISKMSGSSTLSKGSGSMDLTFRLDKDARPAGEGNKSPFARIVSFKAWDEHSPIKVAVDPIGRLSKANDKRPAATKKAGQAKKKKDYKDDDDK

SEQ ID NO: 562 - protein, 1098 aa, synthetic construct
MAPKKKRKVMSTCAEPSDSYVLGLDLGVSSLGWSCLNVTTEQAFSIRCVGVRIFEAGVDGSIEQGKDSSRATVRREKRQPRRQIERRSRRQRKIFRILQRQGLMPDGPSTDQVQIDRLISDLDRTLRTQLLKPGDHIAAQVWPYKLRAMAMDQHLEPHVLGRALYHLAQRRGFLTNRKTDKDDEESGKVKAGIAELSRDMGNQTLGQYLASLDPDTVRIRQRWTARQMYEDEFEKIWTAQQTHHPKLLTPRFKRKLEQAIFKQRPLKSSKALIGRCQLEPDRRKAQLASPLAQRFRLLAAVNNLLIYEPDGKQRTLTADERTKLIQALERSGDLTFAMIRSKKLLDLKKTHKRKDKKTGKQVVTPGYAFNLEEGGEKKIPGDRTAAKLVPIFGDRWFDFSLRQQEQIVHDLLEYQNPDALATRAKDKWALTDEQANTFSKVRLEQGYARFSRRALQRLIPHMEEGLHYMTAQKDEYPESFEVQETHDLLPPVLDAIKDLRNPAVCRALTELRTVVNHVIKTYGMPTMIRLEMARDLKRPRKQREQAWKRNRDRQSERQVAAAKIKAAKLVVGEPNRDAIEKWLLADECNWLCPYTGKTISAEALLGPHPQFDVEHIVPFSISLDNTFINKTLCDSHFNRHRKANKLPTACYDPDGQEWQDTLSRVRRFRGQASSIKLERFQWTEVPDGFTNRDLQDTRYASRLAGEYLALLYGGMVDADGKRCIQVSAGGVTAKLRDVWGMNGILNDGGIKTRDDHRHHAVDAVAIALTSPATVKMLSEAATKAHSAGRHRFAPANEPWPDFIDDLRDAIDSINVSHRADRRISGPLHAETNYSRPISAPGGKLVTRKRVRLDQLTVKNIESDAIVDPSVRDAVRTKWHALGRGNPKQIFVDRINHPYMQTQDGRIIPIHKVRITVNDKPRQIGSGTRKRYVISGKDSLHHTVIVSSQLKNGEKWRDEPVDRMEMHRRLSASPCVPMIQTDWGTDRFVMALCKGDCIEMNDKNHNRSLFIVRSISKADITIRLHTDARTDEQIKLAGERSKYRIRSADELRKRRAVRVVVGPLGDIHRVKIGHVKRPAATKKAGQAKKKKDYKDDDDK

SEQ ID NO: 563 - protein, 1119 aa, synthetic construct
MAPKKKRKVMAAKQSKYRLGLDMGTNSIGWAAVLLDDSGDPCGLLDMGVRIFPDGLDRTGESSNAATRRKARSSRRTRQRYVKRRDEFMALMVQHNLMPTDQAEQRKLETLNPYELRAKALCPEKLPAHHVGRALFHLNQHRGINLNRRTENGDKERGPAKGAAKKLHESMKADSFSTLGQFLYHRQCIGEPVRFRNQGTTEKPKYELYPTRQMILDEFNKIWKAQTPHHPDVMTDKAKEALYKAISFQIDPESPPVGKCTLDPAVDPEDKDGFRCAWAYPLAQHFRIWQEVRNLEVRLPGQASRRLSKEEGDRIAGRLLKQNTVSFNGMRQLLRLPTDAYFNLESPRREKLQGDETAHKLSKKEFFGESWRKFPLPKQTQIIDCLLGENDEDFVVQWLERHTGLKRNAAERVSSALLPQGHCRLGLRAMKKILPHMKEEGLDYAQAAKAAGYDPQVPTDELSPTGRLPYYGERLGNHLLGTGNPDDHPEKRFGRFPNPRVHVGLGQLRRIVNTLISEYGRPQQVVVEMTRELSLSQKQREAREKEQTANQKKNDARRKKLQECGLPPNHRNMLRLRLWEELNPEDALDRRCPFTGKPIPMSQLFSKQVQVEHLIPWQDSWDDSPTNKVVCFTSANQAKGKNTPYQAFHDHPDYDWDSILKRASKLPTNKRRRFEKDAGEMFARQGGFLARQLSETGWLARMSREYLTAIASDVWVTPGRLTGLIRYRLGLEDLLPIKWAGDAKQRNDHRNHAVDALVVALTDDSLLNRMSRAYDEERSKIRVPLPWQGFREEVEACLDKLIVSHKPDFGKRQSEGNTTGQLHKETAYGLIEFREDAPSKVIHRKPLADFSERDVQNVWSPELRKVLKLVWDDVELELKAAGAEQTDRGKLKKASDKRRLAARFAQRVATGGVIVGQKLQYPKRVRVKSNVRHLALIEHKDSRGVVHEKGYELKSNEFADVWWMRDDSWQMVVVPKFYANHPNFDIEDFRPKTAKGEHKGKPDPTAKRLMRLHINDMGALGKGPNPRIVRVRKITDATKDPFVVLDDHNEANVPNRVGKDMRENRYYAHNLKEECFRIVKVDAIGRVDYPEPFKPKRPAATKKAGQAKKKKDYKDDDDK

SEQ ID NO: 564 - protein, 1559 aa, synthetic construct
MAPKKKRKVMKNILGLDIGTNSVGFALIEENEGQYQRIIKAGSRIIPMGQDEISDFNKGNTVTAAAQRRQYRSMRRNKMRRKLRRERIHRMLHSYQMLPAHYDMSIGWDKNDAKHYGQFLEGLEPKLPWIPINKNQSKFLFFNRFENMLQDFKRVHPDFDTENKKIPLDWTIYYLRKIGLTQKLTLEELAWVILQFNQKRGYYQLSMDDATDDATKKQEIKELEVLDVEDLGINKGKREYRVVLPEGLEQIVKSNQPLNWKGEIRTFIVTWTVDAEGNKQTDKEGKIKYSIKQLDPEAADAPFALIKQYTEIQIEDSGLHVGEYIYNSLLHNPEKPIIGKLVATIDRHHYRRELEAILQAQVAFHPELQDHALFDKAVEELYPNNSSHRLSLQAHRSFVKFVVEDIVFYQRPLKSKKSTISNCPLEAREYIDKETGEFVTVPIKCIPKSHPLYQEFRLWQFVYNIRFKSVEITSKKDSDVTAQFLSTPAQYATYFDWLNTKDSIKGSQLLACPSFKLKPKERKAYECNYLEDKTYPCNKTAALYYKLLKKAGIDVEVLEEIESNWMTKLWHILYSVTDLEQREKALDSYAEKMQFSVEDTSNFVTVFKQAQAGEEGYGAYSEKAIKKLLTLMRTGYHWDLSSNDKVLSVVEEWLETGECPKYKNLSDNLREQATSQVTSRGFKEVNDFQGVPFWVASYILYGRHSEASNAKKWKNTRDLDVFLAEFKQNDMRNPVVQNIVRETLLVVRDLWKAYDHIDEIHVELGREMKNSADKRKAMTARIEENENKNLRIRRMLQEFQNASYGVEQVRAHSPMQAEALSIYEEGAIANGGEMPKEVFAIHKKLADSSKVPTASEFMRYKLWLDQRYQSPYTGQIIPLSKLFTSAYEIEHVIPKSRFYDDSFTNKVICESAVNKDKDNMLAMEYIQSRQGKEIACGSKLVPILTPEQYEHHINEVYGRRNRLKAEKLTITEIPDSFIERQLNDTRYISKYVMALLSNIVREDGEETSTSKNLIPCTGGITTRLKKDWGLNDIWNSLIAPRFQRMNELEKTNAYGEYREVDGKRFFQINIPLDIAKGFNKKRIDHRHHALDAIIVACASRRHVQFLNSQEAKSNPKNHDALKEALMVSKGKGNGKGLRTPWPTFTKDVLDCLQNIVPSFKHKARVVSRGSNYTEYIDATGRKATKKQTKGDLWTVRKPLHKETIYGRVNRLIQEELPLKKALDHIDWIVDKEFAAFLQELVDQKKKPAAIVKTVKEHEKYEQYAVAVPVNYYSDELEDETKHLVVVRKSLIDLGDSLKRNSIEDDIMDGAIRRILLNHLDKYMDGDTDHPELAFSADGVNELNKHIIELNGGVFHHPINKVRVTTVKGQRFKVSDACGGSKHAVAASDTNLFYAVYLNEKKDKREYATVPFYEALRCKQEDLPVVPEINENGAKLLFTISPNDLVYMPEEGQSLEDIKSIEDINLNNIYRFVNSSTNRSFYIPATISSMIKEKVEYLKANKIELDDEKMSIKTHCYPLQTDRLGNIIAINNIKLDKRPAATKKAGQAKKKKDYKDDDDK

SEQ ID NO: 565 - protein, 1111 aa, synthetic construct
MAPKKKRKVMTNVKDKKYRLGLDLGTNSIGWAAVSLDDNDEPCGVLGMGVRIFPDGRDAQSKTSNAVDRRMARGQRRRRDRYLERRRDLMDALVEFGLMPQDAEQRKDLQTLDPYALRAKALDEPLEPSELARALFHLNQRRGFKSNRKADTDEVEGRSLSERIGELRRQMQETSARTLGEFLYRRRVNSETVRARPDLRLYPDRAMYLEEFCKIRAAQKPHQPLTPDQWDKLKEIIFHQRPLEPVDPGWCQFEYENDEKRAAKALPVFQEFRILQEVNNIRVRVGSQPERRLDERERGAVLARLRSGKDIDFGKLTGDLRKLLAEADFNLALGGREKIKGDETTARLASSPQPAKGDKPAKPGLFGDKWLNLPIDRRNEIVKFLLNTEDPDKVREKAIQEWGLNTAQADAVARVSLVAGYGSLSEKAINKLLPHLEGGMRYDEAVKKEYKHHSDFRNEEAHDSLPYYGKVLPRDAVGANSKKAPEIDGEVARYGRFPNPTVHIGLNQLRRVVNRLIEAHGKPQDVVVELTRDLKLNPQQKRDLLKQQREGGQSNIRFTEMLQSMGQDVTPNVLRKLRLWEEQGPPQARVCPYTGRRLSCEMVVSEQTEVDHILPYSRTLDNSPSNMVVCIAAANRFKGDRSPDEAFSSNPQNYSYQEILDRVAKFPDNKKWRFQPDAMKRFEEDDRFLDRQLNETSYLSRTAKNYLAYLYDEKGEGRTRVRAAPGRMTALLRRGWCLEGMLRTSPEGEITRKQRDDHRHHAVDAFVVACTTQGLLQKFARAAGASHNSEERLAALAGETPPWEGFDRNKLKPFLGKIVVSYKPDHGTRGAKTKSTTGQLHKETAYGLVEFSENGPSKVVTRKKLDAVKKRKDLESVRDSVMRDALLKLWDDVAREGGEVGSFSDRAAKEGVLLEKGRRQTVRRVRVLDKQTVIPIKRGKGHPEVGKPYKGYLLGGNAWADMWQMPDKQKTWKMVVVPTFHANQPGFKLEQFRPHADAKKLFRIQIDDMGALGDGAERRIVRVRKITNATSGAFVVLDEHNQANVADRVGKDMKENRYSARQLKQLGFRKVGVDEIGRVLDPGPRNPKRPAATKKAGQAKKKKDYKDDDDK

SEQ ID NO: 566 - protein, 1388 aa, synthetic construct
MAPKKKRKVMSKILGLDLGTNSIGWAVVETDNNKTFSLKNKGVRIFQEGVKIEKGIEGSKAAERTGYRSARRLKFRRKLRKIEVLKALIKYDLCPHISDDELINWRYKKIYPTNKEFRNWWLTDNNDNREDRKKQTKNPYYFRSKVATDQLDLTNQEDRYILGRAFYHMAQRRGFLSNRLESTKQSEGAVTQNIKQINQQKGDLTLGQYFYQCYCNGEKIRNQYTDRLEHYEQEFSHICKLQGISDEQKSTLHKAIFYQRPLKSQKGLIGKCPFEPKKSRVAISHPAFEEYRMLCFINSIKIKLPEDDKLRFLTEKEREKVIPVFYRKSKPHFDFEDVAKQLAPAKQYKFYKAKDKNPEDYLFNFNMKTTVSGCPVSARLKSIFGDEWKELQIKHERKDHTDSIIDIYDVWHVLMTYDSEDKLFEFAKYKLSLDEDKTKEFTQFNLPQGHGSLSLKAINKILPFLQLGLIYSHAVFLANMVNVIPPILWNDPENKQLIINEIKKLIQSQNEEKQITDIVNGLIKINKDSNAVWSYEAEKAFKNDLVKNIKAYYGSSKYDSFSNDQKSRIETNAFELLKMQMQKKNGVGEFAKVKRIDDRIKSFLLDNFDGDIKPENLYHPSAIETFKPAQKNNENKYLLGSPITSSVRNPMAMRALHQLRKLINQLINDDVIDEDTIINIEMARDLMNANERKALQNWQRRREDERKKYAAEIAKHYKASGINSEPNNTDILKYQLWEEQNHICIYTGKNIALHQFLGSNPEFDIEHTIPQSLSFDNSQVNITLCDSKYNRTVKRNKIPYELNNPDILLRIHHWKKEYENIDKEIQKCIKNARGASTKEDKDRYIIRRHQLTTQRNYIREKYQSFTRKDVPSGFKNSQLVDIGLITKYARLYLKTVFERVNTVKGTTVADFRKLWGLQNAYETKARVNHIHHCIDAITISCMTKPQYDKLAKFYHDWEYSKEEGMDKKPVFEKPWPTFTEDVKTIENEILISHYTPDSFAKQTKKLLRKRGIIQKGKNGKPIVLKGDTVRGSLHKETFYGAIERTQANKKGELEKVIKYVVRKQVSDLSDADVKNIVDDRIREIVGNARNEEKKIQKEIERLRKKLQKAEEHEEPAIKNDICVLQTEIEQLYSLPNKKGAPIPIKKVRLLQPTVTNPLCIKKQRDVNNKKPKEYKQNYYAANDGNYLMAIYEGKDAKGKIKRDFEIVNNITAGEFFKQSVQGDLKPQGISTNGGLIPKQKENGKLVLPYKSSIKIGTMIILWEKSPTEVFDLELNEIKRRLYKVVGLSAQKLKISGKSYNYATIVLRHHQEASSSSDLKTYDGAFKRDETYMGQRKLNHNQFNALVENIDFDMNTKGTIKWIKQKRPAATKKAGQAKKKKDYKDDDDK

SEQ ID NO: 567 - protein, 1074 aa, synthetic construct
MAPKKKRKVMSRKKNETYVLGLDLGTESIGWALVKNKKGKPESILKSGAHTFDAGVEGNIESGGDESRAKARRDARLPRRQHWRRAWRRRKILRILQRNGMMPEFDTSSPTNVHEGLLAVDSKLREKHSINSHRVSAHLLPYILRKKALEEKLPLHDVGRALYHLAQRRGFLSNRKAGKADDDEGVVKEGISELRQKMEASHSPTLGAYFATLDPEEERIRKRWTSRQMYQDEFYAIWAKQQKHHKALTDELKKELYNALFFQRPLKSQKHLVGKCELIPGAKHAPIALRITQRFRLLQAVNNLWVYLPDNTERTLTRDERNTLIEALETQGDLSFAAIRKMLKLKKGTTFNLEEGGEKRIPGNRTNTALFKIFGDRWLKLTENEKDAVVQDLMSFEKAEPLARRSRNTWKLDKQAALELSELSLEEGYARHSRRALEILTPRLEEGLPYATAKKDEFPESFESTDPLDTLPPVIETVPDLRNPAVCRALTELRKVINAIIRRYGKPEIIRIELARNLKQAKKKRAEISKKNRQNEKSREKAKAKILKELKDSLPSRTDIQKVLLAEECNWICPYTGRSIDMKSLLGKNPQFDIEHILPMSKSLDNSYANRTLCYHEENRDRKGNRTPYEAYHANPENWEQILGRVKKFSGDMAREKLRRFQMEEMPEGFAARALNDTRYISRLAGDYLALLYGGRSDADGKQRIQVSTGGITHHLRNEWAMNSILNDGGEKSRDDHRHHAVDAIAIALASPATVKQLSEAAVKAQQNGRRLFAPVPEPWKDFLAEARDSINRINVSKRASRKIAGILHAETLYSKPMPSRNGEGVRHIRKELHKLSVTEIKGNAIVDPTIRRLVQDKFTQLGENKPDKVFSDPDNHPIIVSSDGRTIPIHKVRIKAKVKPWKIGKGPKERYVSAKAGSNHHTIIVASLDKSNNEIKWEDHPASRFDVHIRKNNKEEIIKRTWNKGQRFRFSITPNDYIIMKDSNGEEQLYRVASISKGDIEFRLHNDARTMDKVKAAKQRVRAGAEKMRKHNARKVHVTYLGEVIPANDKRPAATKKAGQAKKKKDYKDDDDK

SEQ ID NO: 568 - protein, 1080 aa, synthetic construct
MAPKKKRKVMMNHSAETTLGIDLGSNSVGWALTSPDGIVAMGSRIFAEGVSAGIEQGREESRGVERREARQLRRQTDRRVRRLSKAYNLLAGAGLLPPAAKSRHLALQNLDVELGKRHASQEPGAAHTLMYRLRARGLDQKLEADELGRALYSLAQRRGFKSNRKTLAKEDEEEGQVKEGIAQLRKEIEESGARTLGEYYSKLDPVKAKQRIRARWTHRDMFEGEFDQLCAAQQMHHSEVLTDAFVARLREALFYQRPLKPIMPGKCDLETSEYRAPIAHPLNQRIRLVQVVNNLEIVPPTGLGVPEPLTDDQRDLLIETLERDGDLTMAAARKLIGIKGRGWKFNLEEGGEKRLVGNRTSSKIAEAIGDAWTLLPLGDQAKLVEDLLSDKESEELEEHLKGRFTAAQAARLVGVRIEQGYASLSLKAIHKLIPFIEAGDRYGAARHELYGDMDRTGVPLDKLPPAREKFGNLRNPAVERSLSELRKVVNAVVATYGKPDRIHLEVARDLKNPKKRREEIWKRQRANQKSREKAAAGIIAEFPNFQPRRDDLQKHLLWEECNGICPYTGRSISLNALFGDDAQFEIEHIIPRSRSLDNSFNNKTLCTVEANRDKGNRTPYEHFSHDAAAWEQILQRVRRFRGASAYQKLRRFEMKEVTTEDFLERQLNDTRYASKLSAEFVGLLYGGRNADGKQRVQVSPGLATWQLRNEWGLNSILNDGPTSDGGQVLKTRDDHRHHAVDALVIALTTNATVKQLADAAAYGDRDSRREPCSPPWPDFVDSVRKSVDGIVVSHRVDRRVRRKMHNDTFYSKPYERTVKGKTVEVRRYRKWLQNLSTKEVEGIVDPAVRDAVRKKLEEIGDPKKFAEESNLPTLPSRRGDATIIRSARIERVQSVQAIGEGDRQRFVELGSNHHLEVFAVLDKDGNETKWDGRLVSTYEAMQRLRARRHGEETPLVQRDHGPGTRFKFSLSSGEMIELDDGGGARLCVARTISQQGEKNGRRPAPMVEFVSSTDSRLKKGIKQANAWGANPVNTLRKFGCRKVVISPVGEVIEAHDKRPAATKKAGQAKKKKDYKDDDDK

SEQ ID NO: 569 - protein, 1112 aa, synthetic construct
MAPKKKRKVMNTANEKYRLGLDMGTNSIGWAAVRLDDDGDPCGLLDMGVRIFSDGRNPKDGSSNAVKRRLPRGQRRRRDRYLKRRDSLMGALLECGLMPDDKRERKKLEACDPYALRERALDEPLSPYELGRALFHLSHRRGFKSNRKAGNEDESEAKKTRAEIDALRAQIDGSGARTLGEFMAKRHSKGEPVRARRGQNLYPDRAMYEREFDAIREQQKPHQGLSAEQWEWLRSIILFQRPLRPVDPGYCQLETGERRAPKALPIAQEFRMLQEVNNLKIRVGTEPERRLDAKERERALTRLRAGKDIKLREGKDNRPAKLTRDLDLPSGAVFNLARGGRKSVEGDKTAARLMSKKEKGEKEQELFGDRWHEFSPAERNDIAKSMLKTEDPEVVQRKAMDEWGLDEAQAKAISHVSLPRGYGNLSEKAITKLLPHLEKGLVYSDAVLAAGYPHHSDFRNAEAHGKLPYYGEVLERDAVGADPTKDPEKDGEPARYGRIGNPTVHIGLGQLRRVVNGLIESYGKPEEIVVELARDLKMNREQKQNYQRQQREGGERNQRFREDLKSAELSVTPEALRKLRLWEEQGPCQARLCPYTGRPLSFEMVVSSQTEIDHILPFSRTWDDSPANKVVCVREANRYKGDRSPYEAFGKSSDGYDYDKILTYAAKLPDNKRWRFEPDAMKRFEEEGRFLDRQLNETRYLSRTARTYLAHLYDEKTEGSVRVRVVPGHMTAVLRRGWGLENMLRVDQDGVLIKSEKKQRDDHRHHAIDAFVVANTTQGLLQRFARAAGSNDDTEERLAAVAGSVVPWKGFDREDLRPFLNRMVVSHKPDHGTRGVDGKTTGQLHNATAYGLIEYSEDGPSKVVVRKKLTDFKRRADLESIRDSALRQELLALWDRVKSEGGKPADFAERAADGAVLGGHPVRSARVVENLRVIAIKDSNGNPYKGYKLDNNEFADVWAMRDGNWKIRVVSTFEANQRDFDIEDSRPVTSRGKHKGKPDPAAKWLMRLYKGDMGALEDGAGVRIVKVRKFSSGSVILDDHNEANVDGRERKGEIDRNMSIYSAKQLREQGFRKVRVTEIGRVRDLGPLKRPAATKKAGQAKKKKDYKDDDDK

SEQ ID NO: 570 - protein, 1084 aa, synthetic construct
MAPKKKRKVMRQKAPKKCVLGLDLGTNSVGWALLEEGRDGPERIVDLGVRIFEAGVEGDIESGKDESRAKARRDARLVRRQTERRSRRRRKTACLLQRHGLLPKGGLKQDSSRDAIIKSFDADVYLKYAAAVRKKKKDILQTLDQLPYFLRARALDEPLEPFELGRAFYHLSQRRGFLSNRKAPTKDGEEEGQVKQGISELAQEIEQSGARTLGEYFAGLDPHEHRIRKRWTARTMYEQEFEAIWTAQAKHHPKILTAAFKKQLYKSIFRQRPLKSQKGLVGRCELEEGARRAPWASFIAQRFRLLQKVNDLKIVGPAPFFEERGLSPEERTLLIDLLAQTGDAEFTKIRKELGLERGSTFNLERGGEKKLKGDTTTARLRGVFGGRWDALTEDQKEAVLHDVYSIQNEKALASRGVRAWKLSKADAEKLSKTAIEEGYCSLSRKAIERMLPEMEQGVPYATARLHAYPGRDRSIPVGRLPYIDDRDNVNIELRNPAVHRVLSETRKVVNAILDKHGLPGCIRIELARDLKKSRSDRAEIWKKNRQNEQLREKARAKIIKEAVIPQPSREDILRVQLAEECDWTCPYTGKHISMKALVGKDSQFDIEHIIPYSRCLDNSFTNKTLCYHEENRNRKQNKTPQEAYTPDEMDAIVARVKSFKGDRRAVAAKLGRFLTTSLDAFDTFSNRQLNDTRYASTLAAQYLGMLYGGQIDANDTRRIQAGRGQVTSDLRMAWGLNGILGDGGTKTRDDHRHHAIDAVAIALTDAKTVKALSTANSKGYAEGRRNWWKNVPQPWDGFLTELTEAVNGIVVSHRVSRKVNGPMHDETNYGKPYMDDKDKPCCHVRKPLASLSANRIDDIVDPVVRQAVRRKLEELGGDPAKAFKDEQNLPYLTTHDGRKIPIRKARIRVVASAKTIGKGSRERHVLLNANHHAEIIEITDKKGNAKWDDIIVDRYTAMRRLLKHEPIIQHEHGEGKRFVMSLTQGDVLLIKDDDDNEQLVIVRSVSKKDYCFVRLTEARLKKDIVAAGKWVRFQSFSLFQSRFIKKLHLTPLGEMRDSNDKRPAATKKAGQAKKKKDYKDDDDK

SEQ ID NO: 571 - protein, 1089 aa, synthetic construct
MAPKKKRKVMGSYTVLGLDLGAQSVGWTLLEYKKDNPARIVDMGARIFEAGVEGDLESGKEESKTTDRREARLRRRQAERRSRRMENLACLLRRHGFLPKGKIRSGKERHELLAKLDKEIYDKYRKELGEDNDSLDSLRQLPYFLRARALDHKLAPCELGRALYHLAQRRGYLSNRKAQRNDSDKDSGKVEPAIHSLREKMEADGVRTLGEYLAKIDPFEEQRLRQRWTARSMYKDEFEAIWAAQKKHHRKKLHDTLKKEVYNAIFFQRPLKSQKRLIGECDLVAKKKRAPKALLLSQRFRYLQKLNDLRVTFPDGVERELTDEERNTLIPLFEGQANVSFAAMRKPLKFPKTVEFNFEKSEKNLPGNVTRARLEKIFGARWEKLDAESQNTIVGEVMGALNPDTLAKRGEFWGLDPEAAAEFGKVQLESGYVNLSREAMRELLPLMEQGMAFRTAVTERYGDQWAKTALEKLPPLIDAVPTVRNPAVTRTLTEMRKVINAVIDKHGKPTYTRIELARELKKNAKARNEIFKNNRKRRMARETIRESIQKHNGDANPSRRDIERVLLWQECNECCPYTGKKISFASLLSPESSWDIEHIIPFSRCLDDSFFNKTLCYHEENQHVKKNQTPYEAYEATAQWEDILSRVKQFKGDAAKEKLKRFQQTNLDDFEDFSARKLNDTRYASKLAAQYVSWLYGEEARKRVQVSTGQITAYLRGAWKLNQILNDGDNSKTRADHRHHAVDALVVALIDHSTVKRLADAAKKQQFKNGRYNGFTKRFGRDEPWEGFLDDVYHAVDNITVSHRVSRKISGCLHDDTIYSPPQEDEKGKEYVKVRKYLGEKFGPKEIQKVVDPEIQRILQSWLDDHHGDSKAAFADPDNHPYLYVHNEDSSRGKIPIHKVRMKEYREVQQIGKDHRSRHVWPRANNHIEIFALHDKDGNVKKWEGRVVSKLDVHQRKKQGLPIIDRHWDKQHTFLFSLTQGDTIEVDVEISNDETIRELYYVRGISNQLTCSHISDARKKGDIPGKQTENEKTRFLLRPYVTSLQKLNCKKTSISPLGEIYLANDKRPAATKKAGQAKKKKDYKDDDDK

SEQ ID NO: 572 - protein, 1440 aa, synthetic construct
MAPKKKRKVMSNILGIDLGTNSTGWAIRDTEIEDNQIVDYGVITFDKGVASEKGNEFPKVQKRTESRGKRRNYQAEKYRKWELLKFLIEKGMCPLTIDELNNWKKYRKGEQRKYPQSEEWINWLRFDFNGDGKPDFHLFGKDEHESYYIFRAAVLDSNFKFVYENNPQILGRIFYQLVQHRGFRGRDEEEAKTMLEGSTKNGTAGRNDIASYIDQHKTLGAALYHYQKENGGRIRQRYNLRKDFESELQQICAFHNFSEEDYKKLWKAIIWQRPLRTQKGLVGKCIYEKNKKRVQISHPLYEEYRTWIFINNLKIVPPNGYDKEAYLKEKIYPLFLRASNDFKLEAIRKQLTKDGAIMLAHFADKTKVISAKLLNAYSTLLGEDWRENFGWNTINNRDKQPQKKTTANYSFEDIWHVLNTFDGQENLKQFAIEKLNLDEEKAEKFSKLKLNNGYATLSLSAIKKILPFLQKGFLYSQAVYMANLYKVLGSETISDELIDYFANEVNEIIDGNKKEKLQNTIVNSLVQDELNSEHRFSIEVDRELDNSEIQQINDKIIDIIGQSSWEKNYSEEEQQELLNYVTHKFKEFLKKSVLSKRNVFIEQPRLHEQIWQFTKTTYNVPDENKKYLWHPSEQDTYVSADDYEEVMYCGKTTYIPKREIEKYLKKHDNAELACRTIKLLGSPEPISKGFKNPMALKSLHKLKHLINYLLQTGKIDEDTRIVVEIARELNNANMRKAIEQWNAKREKENDNYRKEIAQYNDEKGTKIDENDRNLLKKIRLWHEQNKRCIYTDNPISISNILNGENYDIEHTIPASISFDSELKNLTLADVDFNRNVKGKQFPSQLANYDVILKNIEVIFGKKTVKIETDKKGNKKEYTTWQKIEDLEDQIHQKNIAVKCATSVHTNNGYCKCKNCEIQRRHILQFNLKYLKDKLNTFTIDEYKASWRNSQIRDTQIITKYALPYLKTVFKKVSVEKGSITNAFKEIYKVKLTEGKKDRSVHSHHAQDAAILTLIPPFFDRDKILEKYFREKEIDYRRCYHEKPKDWDNFSASYILGIENNVLINNLSENKTTLPTYKIVRKRGKKIWLDKEQNIPMIAQGDTIRGQLHGESIYGAIKLPLRNENNQILFDDEGKMLLSEEPILVIRKDLKYKKDANSTGFKTLGEIENAIVDKDLFKVIKQQVEDATDFKTALENGIYMLDKNGNKVNKIRRIRCIEKMKYNTAIKVHEHTTKSDKDYKRHTLAKNGENALCLFYKNEKGKAMQILSISEVAELRYKNDKQYFHENDFKETLTGRGKNKVSIPLYAVLRNGCKVLFYKNTIEELNDLSQSELSKRLYKIYQFEKEVRNNSIKYRMKLKHHLAAGIDTELKKVHKEYSSPDFALNQVFLRLSKGQWNFAIEGKDFEMKLDGTIEFKDKRPAATKKAGQAKKKKDYKDDDDK

SEQ ID NO: 573 - protein, 1079 aa, synthetic construct
MAPKKKRKVMVCMPLVFGLDIGTTSVGFAVIEHDSELATGKIHRLGVRIFPEARDPKGVPLNQERRQARLRRRQLRRRRERRRLLGDQLRAAGLLPSRNSPDWDRVMKRDPYDLRRRAFEGETLSPHEIGRAIYHLAQRRHFRGRDIDEVSDTADDAAGDADEKKATSAREQTVQALKREGKTLGAWLSARGPHERKRGEHATRDIVEDEFDTVWMPLVPEPFRSSVRDAIFVQRPVFWRLNTLGKCRFVPDAPLCPKGSWLSQQRRMLEKLNNLALAGGNQRPLDPEERQAILSRLQVQASMTWPGVRRALAPVYRARGEPGEERALKFNLEEGGEKKLLGNPVEAKLADIFGSDWQEHPRKQEIRDSLPRRTWQADYEQVGDQRVVILPKAERTTRRAEVVQNFVAEFGLSNDQAAKIETMKLPSGWEPYSIEALQAMLPHLEAGVRFGELVNGPDREEWRAKTFPGREQPTGEVFDRLPSPADREEREHVASLRNPTVARARNELRKVVNNLIDLYGKPDLIRVEVARDVGNSKRQREEKASGIRRQERRRKAARETLQQNGIAEPSRAVVEKWMLWEECGHRCPYTGDTISFDALFRTGDFEVEHIWPRSLSLDNSFRNKTLCRKDVNLQKGNQTPYEFFRSNEEEWDALANRLAGMKAARGGTGMSPGKIRRFLTPSIPDGFAARQLNDTGYAAREAVAYLKKLWPDQGPEAPVKVFAVSGRVTGHLRRLWRLNNILADDGEKTRADHRHHAIDALTVACCHPGMTQKLSRHWQEEDDPRAPQPHLPPPWETIRRDAKSAVAAIVVSHRVRRKVSGQLHKETIYRDTGEEIAGARGTTYRYFVRRKAVEELKNSESERFNGTRIIDIVDDGARDIVQIWVDKHGGDPGAAFVDGYPKRGRKGPEIRKVRLRVKQQIELMTKASTGYADLGNNHHIAIYRLADGTVDYDAVSLLEASRRKARHEPVVRRERGDGAQFVMSLSPGDTLQTSENGEAKLRVVTGVWSNGQIVMCDNLDAAKATETRPGAKTIVSSDGRKVSVDPIGRIRPANDKRPAATKKAGQAKKKKDYKDDDDK

SEQ ID NO: 574 - protein, 1371 aa, synthetic construct
MAPKKKRKVMAKILGLDLGTNSIGWAVTETDDYQNFSLLDKGVRIFQEGVKIEKGVESSKAAERTGFRSARRIKYRRKLRKINTLAVLAKYGYCPGIDTAALRNWRYKKIYPSSELFRNWQKTDEATQKNPYHFRAIAAQTQLDLTDEHNRQKLGRAFYHLAQRRGFLSNRLETTKENNGAVIQAIDELSEAKAQLTLGQYFYQLYTQKGKIRKHYTHREKHYLEEFETICRVQQLPGDFTSELRKAIFFQRPLRSQKALVGHCPFEKNKARCPISHPAFEQFRMLAFINSIKIQTPGDELLRALSQEEKTQIAPLFYRKSKEHFNFEEIAKKLCPKNTLYLYFKEKEKPEVCYQFNYSMNSSVSGCRTIAQLREIFGEDWEKSINERYTLTKQKNGKKSSDEVINDIWHVLFSFDKTEKLKEFASLRLGLEQSMAEKFAEIKLKRDYASLSLKAIRKINPYLQEGLLYNHAVFLAKLEDLIPRSVWSDDENKALIKDEIRLIIESQNYEKQMTDLVNGIVKINRDDQASWSENPYWQEALQNDLNKKLASYYGQRRWDEMNTDDKDSLRNELFIRVKKQMQANLGRGSFAKTQTIEERIKNFISDQFEIDESQLEGMYHPSAIEVYREARRSNDGNYYLDSPMISAVRNPMAMRSLHQLRRVINELLKEGTIDRDTKINIEMARDLKNANERKALQRWQKARENERNAYREQLKKDILAATGKEIEPSDRDLLKYQLWEEQNHMCLYTGAYIGLAEFIGDSPKYDIEHTIPRSLSFDNSQENLTLCDSRYNREVKRNRIPSELPEHSQILERLKDWENRIEETQRNIDKAKFRSKVSIEKNRKDKAIEDRHFFQFEHNYWQGKYKRFVMKDVPEGFKNSQLVDTGIITKYARLYLKTVFRQVNTVKGKTVADFRKLWGIQDEFESKERSNHIHHCMDAVTMACISQDAYQRLAKAYHDWEENRPIQRSDMPQVEKPWPTFTEEIKKLEEEVLVSHYTPDNLPKKTKKILRIRGKKQYNEQGEPIYQQGHSVRASLHKDTCYGAIKQTAPNKKGITEEQTVYVVRKAVDSLTDSDIQNIVDCRIRTLVEEGKKREAVLRKELEKAEKRLRDAELPEIQEQWQHEVQSLHEEIRRLYAIPNHDGSFTPIKKVRCIARTVTDPVFPNKKHRDERKKKSLQQSQKEYKRFRYYANDGNYLIALYQGIDNKGKIRRDFIVINNMTAAKYFNNNDNENTIPEIHPKSGLPLQYTLKTGTMILVWKDSPEEVWKSNKNPLTIRLYKLVKFDKSGRLYFRPHTEARPANELKEEYTFSLDRFVEQLCFSSSKFTALVEGYDFTISPTGKITRLKKRPAATKKAGQAKKKKDYKDDDDK

SEQ ID NO: 575 - protein, 1919 aa, synthetic construct
MAPKKKRKVMKNILGLDLGTNSIGWALIEIDHENGIVRILGLGARILPMDADEINDFQSKGTIKSTTAQRTDDRGVRRNKERFLLRRDRLHLILNLLNALPEHYKIEIDFERNGEKCGQFKNYKEPKLAYIRNRANDKRFDFLFEDSYNEMLNEFGVEYKKRKLIPRDWTLYYLRQKALTQKIALEELAWVLLSYNQKRGYEKNEVEDKTSKENEIVEVLDLRVKNVTEIVDKEGGKYFKVELNCIDNIIYNEYSDIQMTFENDLKEIKVITKIDDSGNTTSKEFSVLDIFSLKIKEVNYEKQEDKHNYTITYLNGWKEIKTLKKYTFRYKNVINKPFEYIVETVYDEKGNIKPILGKFRKLREPDFGDNSNDWTLLKKKTEKEALAYNIENGYINKNTGEPKKYLSPQIFHILKNDAQSGNRTKIIGGMFQVIEREFYREELAQIISTQKQYYTNLNDRKTFEKCVQLLYPNNEAHAKSLMANKKAIQQLLIEDILLYQRPLKSKKSEIANCKYEIRQWKDAIDKKTGKPVEEIDIETGEICIKKEPIYHKVVSTSHPYFQEFRIWDKLHNLRLIQIEKEAEGKIKTNVDVTDDYFKNDTYQKLFQLLNNKSTLKQSGLLDFLKSKFEEKNENAKNFVWNLPENEEIKGNETRVSFTIRFKRCGLKDYNKLLTKDKEIALWHYLYSVSYKERIADDFKSIKSFFSKFLDGVDIPDIVKDNLIKDFANYPKFASKYCAYSEKALKKLLPFIRIGEFNDSFDITEFSSDLNAINYDKSMILSYIKYNPIDRMKLSPKESIDLEIKRRNLYKAIWEHSINERIKEIRKRLDTIDFEVDEVDFSKVVSNDSNNGNIPFPKGLFNAFKALKTSDKPKEFTNLNLAQASYLVYGRHSELAQAKYWTSPKQIRDELHQELKLHSLNNPVAERVILEMIQIVADIWDYYGDGKDKFFSEIHLEVGRDLKKSAKEKQNIINYQNENKAQNKRLRQVLEDFLSKSPYNAIPQNSDHFERLKVMEDGAAHTKNTDKNFFIEKSYTKKEIDEILKKPNITQGDFDKYKLWIEQGYKSPYTNRIIKLTDLFNGNKYNIDHVFPQASVTNDSLINKVVCEREINTLKSKQTGRDFINNPSQRRISCEAHKTKENPKGIVEIVNDNTYVSIVKTQFSGHKRQILLSKEIPANFTNSQLNNARHIARKAMELLSHIVREPGEVEFRSKNVLPVTGEVTSKLKKAWRLDEVWRELVAPRFMRMNELTKSNLFGQEQISKSGAKYFDCNIDNSIREKDPSYDIKRIDHRHHALDALIVALCTEDHVNYINNINANVTSEDHRKQKQIEKYRETLKRKIMFSKPNKENPKVKDWFYMLPGQRREAEAETSTIDTVLRIFFYFKDTGFNMDYKSMVLSALEHTIVTYKQNLRVINKTVNRYNNTPNKNKFEIQKDKEADNQYNWAIRRSLGKDTYYGKVNLKLKEKNKLHSMLEAIFENVTIIVDKELKKQIIEIKANSNLKHFKKKIKELYRDNPTFDFYYFTDTTKDSKKIASREFLSDKFYSKKILEITDTGIQKILLNHLKQFDTVKLRFEEALQYFDALKEKPELESILNKGDSKFNTLDDLINYLKSHENKYDKVDYSELNVFIEQVHDRDFRADETFKDIIDEHPEIAFSVDQIDLMNQAENIKKLNDGKNHAPIRKVRSSRGFGNQRQVSDDLQSVKSKQYIVNDAGSNLYLGFYEGVYEDNKITERKFQDIGLMELIEILKQDKSKRLNPLPQSILDERKNTEYNWLFTLSPLDLVFVPNEEEIENPSLVNLNILNKEQIKRVYTLNNFTGGDIYFSPNSHAKSIHEKEVDLKFDTKTSKLKGSFPDKTTSISSGSKTNQIKNICYKLEVDKLGNIPKPNKLRIDKRPAATKKAGQAKKKKDYKDDDDK

SEQ ID NO: 576 - protein, 1096 aa, synthetic construct
MAPKKKRKVMRERLGGADAGKRSYRLGIDLGANSLGWSVIWLDEDKPNGLGPAGVRIYADGRDPQSKTSNAVTRRVARGARRRRDRYLVRRKALMEALVAAGLMPADAAARKALERLDPYDLRARGLDEALALTHFGRALFHINQRRGFKSNRKTDGQNEEKGAIAEAGKQLREQMLAAGARTLGAYLARRHARREAVRARNVSSGAKAAYDFYPQRAMLEDEFGQLWRAQAKWHPELTQALYDQLFEIIFYQRPLVSPPVGKCALDPAKQPDDLEGFRCSWAHPLAQRFRILQEVNNLAVGLVGEAKEALSPEQRQKVYLSLRAKKSMSFDGLRRLLKLTAEQIFNLESEKRSKLEGDQTAWRLADKKRFGKAWHSYAPERQAAIVERLLEEPDEQALVEWLMAETGVEEARAWVIADSPLPESHCRLGLRALKALLPLMEAGKRYHEAAAEAGYDHARMPTGEIRDRLPYYGEILQDHVVGSGDSRDPAEKRWGRLPNPTVHIGLNQLRRVVNALIKRHGPPSQVVVEMARDFKLSPQALRKLELEQAANQKKNDRRREQLEALRLPVNHGNLLKLRLWEELNETDEADRKCPFTGETISIRRLLSDEVEIEHLIPFSRSWDDSAANKTVSLRSANRAKGNKTPFEAFGSSPTINGRHYDWEQITARAANLPGNKRWRFDPDALQRFEAGGGFLARQLNETSWLARLARQYLGSVTDPRQVWVVPGRLTALLRGKWGLNDLLNLAGGVKNRNDHRHHALDALVAGMTDRGLLQRMAREYDEVRDRIEVSAPWVGFRQDAARVLDAILVSHKPDHGAQGQLHEDTAYGLLEPPEEGGNLVYRKALKDLNEREIGRIRDPALRSELEHAVASGKAAGKALPEVLQAFGVAWGQRHSRAAPGKEHGALRHVRLTKVEGADYLVSIADRDGQAFKAYSAGDNHCVEIYETPDGRWEGEAITVFQANRGGYRAAWRKAHPQARPVMRVHKGDCIRVETEAGPAFLIAHRLDAAAKRFKLAPHNEAGALDKRHNDPDDPFRWRMFSYNKLRSLQAARVRIDEVGRPWRQTAKGPGSKRPAATKKAGQAKKKKDYKDDDDK

SEQ ID NO: 577 - protein, 1155 aa, synthetic construct
MAPKKKRKVMEVKKMARHLTTLGIDLGTNSLGWCLVETIGEPGEAGEGRIVDIGARIFSAADMAGRDAKSKESLAVARRLGRTTRRQRDRRLRRKSRLLDQLTEFGLMPAEKPARERLVRETGDKEGGDLSASVYALRAKALDEALTPHELGRVLFQLNQRRGFKSNRKTDGKDNDAGKIAVGVSRLHRAMDTERARTYGEFLHKRRLAGKSVRTRLRPESMAEFDNDPEAKGDGYDFYSDRSELENEFDQITAAQASYHPTILTSERIAVLRDTILFQRNLVPPKVGKCSYNPDETRLPKAHPLFQQFRLYKEVNELALIGEDQNPVKLTPDQRDTLVLKLRKAKKAKFTALRKLLKLGPEFRFNKETDSRTELEGDVVSAALSHKNCFGPNWTAKSIDEQWGIVEQLRGEPDPDALLKWLSDSCGLDDDRIEAVMKVSLPEGYGRLGPSALANLLDALKHDTDDNGRVITEAAAAIEIYGRTNAEDDPDRKAVKTLPKYQEVLTRHIPPGEGSVSEPPDNDDPGYDRHMGRITNPTVHIALNQLRRVVNAIIRKHGRPDRIAIELGRELKLTDKMREEVNRTIARNTKEAEARSDKLQELGQPDTGYNRLRLKLWEELNPDQPLNRVCIYSGKPISMREVFTAEVDVDHILPYSKTLDDSQANKLLCKARANRVKRNRAPAEVGEWDAVYDDILARAGNLPKNKQWRFARNAMDRFADENGFAARQLTDMQYTSRMALSYLAVLYPAEQANIDGVPRRHNHIRALPGRMTEMLRRKWALNEILHDHNFGDPVKPKNRKDHRHHAIDAFVIACTSRSLIQRIAAAAEEIEAEGSEKVLGRVPEPWPGFRDELRQKVLGSVVSHKQDHGTISQAGYASGKGKTAGKLHNDTAYGLTGETDEKGNELVVHRMPLDDFKSPKHLMAIRDEQLRDTLWEATRDLSGKDFKKALRDISSSDRLNGSVNPYKELRRVRVLEPLQIIPIRNRSGKVYKGYKGNSNHRYDVWQLPGGKWVAEVVSTFDAHQPGWTSKVRGDNPTAKKVLSLQQNDMVAIERDNGRQICRVVKFSSAGQLTLAEHNEAGALKARDADKTDPFKYVYTSGTGLGKLRARQVRIDEIGQVFDPGPHWTDKNKRPAATKKAGQAKKKKDYKDDDDK

SEQ ID NO: 578 - protein, 1042 aa, synthetic construct
MAPKKKRKVMKSTVLGLDLGTNSIGWALMERNEENNPVGIIDCGVRIFQEAVEAKTRTPKNVKRREARAARRLTQRRTMRKRTLKNALIRIELLPDNMEECDTILRNTVEYDPYLLRARGLDEKLTPFELGRALYHMNQRRGFLSNRKSGKKKDEGPVKQSIQYIEKQMEQSGYRTLGEYLFHQEEKRNRRTDSKLSQKQTEILTFTARSMYEKEFDLLWESQRHFYPEQLTDAKKNTIYKIIFFQRPLRIQKHLIGYCRFEPGKHRAAKATLTAQRFRILQDVNNLQIKNPLTREFRPLTEQERSITLRELDKTKKLEWKTLRRKLGIHEGELFNLENGGKPHLPGNSTATTFRGVLKKEWDQFSEKQQEQLVTDILTIDDENGFLNRMKDHWNFSDEIANKLATTELVNGYVALSQKAMKRIIPFLEKGLTYDKACEEVGYNHTDQKSSKGHLEFLDSPPSIPNPVVQKALWEVRKVMNALIRKYGKPALIRIEMAREMKQGKKLRDATNKRNREMETYHKKIKERLQSEMNMQQPTRDDILKYKLWDECGMTCPYTGKPISLSMLFSPEVEIEHIIPYSRSLDDSYMNKTLCLTHENTNVKKNMTPYEAYSHDEKRYREILLRIDKDHMPKMPWPKRKLFEKKEVDTDHFINRQLTDTSYICNEVKEYVKRLGVDVDVTKGGATAGLRMHWNLNTILARQPGETAKERSDHRHHAIDAIVTTLTTRSMFQFLSRIAKSAPYMGGLYDRRFQIPPPYEGFRDDVYCQIQKIVVSHAASRKISGALHEETALGLAGEGKKSGYVELVHRIPLNGNITKNQIEAIRDDHVKAIVKRRLAEFSDDPKKAFADTVFHKDGKTPIHTVRITEEKSMDTLTSVKDKYDMPYKYFALGSNHHVEIFENEETGKRKGIFVSVMEAARRVRIDHTPLFDRSYKEGWRFVMTLMINDMVIVDVDGENRIYRVQKMTGAGAKSEMTLRAHTASTLTYDNERLIKTPNTLQCKKISVDPIGQIRRCNDKRPAATKKAGQAKKKKDYKDDDDK

SEQ ID NO: 579 - protein, 1130 aa, synthetic construct
MAPKKKRKVMVAVNLGRRTILGLDLGVTSVGWALIEYDGQKPVKILATGVRHFDTAATNAKDFAAGTHKTKNADRRRPQRHMRRQLNRRKQRKKQAFQALQAAGLLPAASATSEDQRHKIIRQVDGRLRRKWMVKGDHRKQQLLPYLLRDAATRRQVTAEELGRALYHLAQRRGFKSNRKTDRDEDDKSTVYEGIGTLESELQAAGCETYGQYFATLDPQRNGCRIRGRYTSRQHYEREFDKIIDAQRPFHPQLAQHAKAIRRAIFFQNPLKSQRRFLGSCELYGNRRRAPKACLAFQCFRICQQVNNLSLVLPNGYRQPLAPEERETLYKALQGKHKLTSAGVLKELGFKRNSGHAIHGIGESGKEIIGNRTACELRGALGDVWDGLRDEQQARLVDEITQFTNPEALARRLAKEFGLSLQQATAAARARIEGDYASYSRVALQELLPLLKAGRTLPSAIEEVCGHSRRPRAQVATERGGRHSRNPETPLLPPLGATRCGRHVRNPVVIRCLTELRKVVNHILRDPALGRPDEIRIELMRDLKRSRKVREARHRTIKKNTDRNKQIEHELQTQPETERFFRTAPPRRSDVDKWKLYEECQGMCPYTGQEISPGDLYGPNPQFDVEHIVPASRFPDNSLANKTLCEHKENRERKKGQTPWEAYHETDQYAHILRRVKAFKGPLSARKLELFQRKELPAQMSAQQLVDSQYSAALAAEYLGEVYGGQVDSAGRRRVSASNGRVTAHLRALWRLNEILGSESAEKNRADLRHHAVDALVVALTTPGAVAALARFVQEGESLGLDNPFAARHRRRAKPFDLPWAAFREEAEREILSIVVSHRPEHRLRGQLHKDTMYGAPGRRGAEDPNRPTQRVALCDLSRKAIEGNVLVSPLVRRCVLEKLRSLDQPGKPASPEVFKDTANLPEYPGRNGQSPHIIRRVKTYRSASKTIHVRNGNPGGRYEPGGNHHVPILVEVDDAGHEKHDGEGRSLLSFGKVVSRFDAVRRLTQDNTEVVNRVYDPGLRLKFTLMRGDLVEMADDDKVRRIYRMMNLSDGDYRFRAVHLAEGDNNSLKERRDLYQRIRSNTDFSKRFPRKVIVDPLGRVHNSGGKRPAATKKAGQAKKKKDYKDDDDK

SEQ ID NO: 580 - protein, 1435 aa, synthetic construct
MAPKKKRKVMSNNYYLGLDCGTSSIGWAVTDETYNIQKAKGKSLWGIRLFENAKSAEERRGFRATRRNTYRTRARLDLLDELFENEIDKIDPQFFQRLKDSKYYFEDKNNINDKNTLFNDTNFNDIHFHKKYPTIFHLRSELIHSNKKHDIRLVYLAIHHILKNRGHFIYEGQQIENVQNVENLFQNLKLIFSDLFPDITISYPNGISEIENILTNKTINNKLKELKYNISVDSDNEKIAKSIQTEITKALNGNKVNILKLIPITTLSEEDLEYKDFSFSSSSYEDQELAIKNTLGLDNFEIISCLKEIYDWALLFSILQGKHYISDSKIQTYNEHKKQLIELKKLIKKYCPEKYSEAFHSTKDKLFNYSAYIGHGLDNGKKNKGEIKSKCTIEDVNKYFKKLLENAHKKYNEDKLLNEIYSKLETNSLLQKAINSDNRVIPYQVNLIELETILKNATKYLTFLNEKDNEGYSINEKIIAIMKFRIPYYVGPLVEKTNDNKEYQKFSWMIRKENSTGKILPWKFTDQVDLAACGNEFIKRMARKCTYLPNENVLPKNSLLNSEFTVLNEINNLKINGEKPSLDLKNEIFNLFKNFKTVSTNRIKDLIISKGIFNKRTEIIFSGIDKTFKSSLSSYIDFKEIIESEKLSIPEIELIIEWATVFSEGQKILKEKIEENFENKLDEKDIKYILSKCRAYSGWGHLSRKFLTEMYHIDEYGECKNIINLMKETSNNLMELMSINYTISKSVEEELMNYNNDYDTWSYENLIAPLPVSPLIKRSIWQTIKIVNEIRQVTKKDPKKIFIEMARGPEENQINQRTNSRKNNLIFQYKNLTENEEALNILKSLENKSDADLRKDKLYLYFTQFGRCMYSNEKINLDDLLISNKYDIDHIYPQKNIKDDSLNNRVLVLKEENGKKSDRYPLSIDIQNKCKSHWTFLYKNNLITKEKYNRLIRKTKLDNSELESFIARQIVETRQSTKAIAKLLEKLCPSSSIIYSKANSVAQFKKDYHIYKSRSVNDLHHAKDAYLNIVVGNAYYTKFTKDPKFILKNENKDSYNISKLFYYDIKRNNYYAWHMDVNGKARREEKNQKENSQDFLKFPETGTIVRVRETLSKNNILFTRQTFQRSGKLSDSLIVKKGANNDVLPIKSSDIKMLDVEKYGGYNKIAKAYFFIAEYTNNNKRIKRFFDIPIYKASEIENGKTTLYEYCINILELKDPKIIIPKVLINTKIKINDFLYEISGAMGDAIGLKTAIPLIISNKNYNYYFYLEKYLEKMKNYLRFNKNISEEELTSFSENQMFKYKISSEKNLELYNELNDKLKNSIFKNRVSNSIKNNFEENIDLFINSSIYNQAIFLEQFITLFACKYGNVDLTLIKGAKNSGTPKISRNINSNITFIYQSITGIYESRKEVKIKRPAATKKAGQAKKKKDYKDDDDK

SEQ ID NO: 581 - protein, 1123 aa, synthetic construct
MAPKKKRKVMARILGLDLGTNSIGWALIDDKENKIINTGVRIFQEGINRDTKGGELSKNETRRNARQLRKQYFRRSLRKKLLLKILKENQMCPIEENDFSTWIKMNPYKLRALAIHSKLSLTEIGRIFFHIAQRRGFKSSRKSGKEDGKIYSGLKESGTIGIDQTQENIAKGYHTLGEYLASIDPSEERLRNRYTTRRMYEQEFELIWDKQAQFHPKTFTHSLKDKLGYEKEGIIFYQRKLKSQKTNIGKCTLEPNKHRCPISTPVYEEFRTWQFINTIQYDQKRLSNDEREVASQFFFNKASFKFSELKKKLGLSEYNFNYDDDQKIPGTSTISTFRKLFTTNIWEAKTDKEKDIIWHIFFSAEDTDWLEEYAKTNWNFDQKTSAKLKNINLKQDYSNLSRKAINNILPFLKKGYLYNDAVVLGGIRNAIGGEKFDALEETEYNMIIDGYFAAKKFKNKEGELIELVKNFLIDHYHLNDKALKKLYHHSQDTESMLVVSKLPEPENLRNPIAQQAIFELRTLINKLIENYGKPDTINVEMARDLKSSKKQRDEYRFNQRRNQEKNDEARVEVEKFGLKPSRNNIQKYLLWKELEAKNGIAVCPYTGKTINEEDALGENNKFQIEHIIPYSVSLDDSFANKTLCDAKENQKKGDKTPYQFYGGDKKDWQMRSERAFKLLPYHKAKKFVSTKEFQLDDFIQRQLNDTRIISKAAKDYLKQLGVKVSVLPGQLTSELRSKWGLNNILNPEEGKKTRDDHRHHAIDALTVAATKQSFLQEMSKWNKYNKSYDLKDFPKPWKSFFEDTQTSINNVLVSYHKQHRTITKANKTIKKDGKKYKSSGISARGQLHKETVYGQHLSSNGEKYYHVRKPLNTIDNKAKVDKIVDPMVRSIIESFLRGKGINVDEKYKLDKDIFFKINEDTGQKETLIYLPNKNGSPIPVKKVRIKEFSTGAVKLKDHINQWVEPGNNHHISIYKNGDAYVEEVVTFWEAVERKKQGLPVINKTPKNGNEFECSLQINDLFLLNINEVDINWEKPDQNYLSKFLYRVQKLSASYYTFRHHLAATLEYKDEEITIQSFKAWKGHNPLKVKINHFGEISRFKRPAATKKAGQAKKKKDYKDDDDK

SEQ ID NO: 582 - protein, 1388 aa, synthetic construct
MAPKKKRKVMSKILGLDLGTNSIGWAVVETENNKTFSLKNKGVRIFQEGVKIEKGVEGSKAAERTGYRSARRLKFRRKLRKIEVLKALIKYDLCPPISGDELNIWRYKKIYPTNKEFRNWWLTDNNDNRADRKKQTKNPYYYRSKVATDQLDLTKQEDRYILGRAFYHMAQRRGFLSNRLENTKESDGAVTQNIKQINQQKGDLTLGQYFYQCYCKGEKIRNQYTDRLEHYEQEFNHICKLQGVSDEQKNTLHKAIFYQRPLKSQKGLIGKCPFEPKKSRVAISHPAFEEYRMLCFVNSIKIKLPEDDKLRFLTEKEREKIIPVFYRKSKPHFDFEDIAKQLAPAKQYKFYKAKDKNPEDYLFNFNMKTTVSGCPVSARLKSIFGDEWKELQIKHERKDHSKSIIDIYDVWHVLMTYDSEDKLFEFAKCKLGLGEDKTKEFVQFNLPQGYGSLSLKAINKILPFLQMGLIYSHAVFLANMANVIPPILWNDPENKQLIINEIKELIQSQNEEKQITDIVNGLIKINKDSNAVWSNEAEKAFKNDLLQNIKAYYGSTKFDSFSIAQKSSIETNAFELLKTQMQKKNGVGEFAKVKRIDERIKDFLIDNFNDDIKPENLYHPSAIETFKPAQKNNEDKYLLGSPITSSVRNPMAMRALHQLRKLINQLINDDVIDEDTIINIEMARDLMNANERKALQNWQRRREDERKKYAAEIVKHYKASGINAEPSNNDILKYQLWEEQNHICLYTGKNIALHQFLGSNPEFDIEHTIPQSLSFDNSQVNITLCDSKYNRTVKRNKIPYELNNPDILLRIHHWKKEYENIDKDIQKCIKNARGASTKEDKDRHIIRRHQLTTQRNYIREKYQSFTRKDVPSGFKNSQLVDIGLITKYARLYLKTVFDRVNTVKGTTVADFRKLWGLQNAYETKARVNHIHHCIDAITIACMTKPQYDKLAKFYHDWECLKEEGVDKKPVFEKPWPTFTEDVKGIENEILISHYTPDSFAKQSKKLLRKRGIIQKDKNGNPIVLKGDTVRGSLHKETFYGAIERTQANKKGELEKVIKYVVRKKVSDLSDTDVKNIVDDRIREIVGNARNEEKKIQKEIERLKKDLQKAEEHEEPAINDKICVLQTEIEQLYSLPNKKGVPIPIKKVRLLQPSVTNPLCIKKQRDVSTKKPKEYKQNYYAANDGNYLMAIYEGKDAKGKIKRDFEIVNNITAGEFFKQSVQGDLKPQGISTNGGLIPKQKENGKLVLPYKSSIKIGTMIILWEKSPTEVFDLELNEIKRRLYKVVGLSAQKLKISGKSYNYATIVLRHHQEASSSSDLKTYDGAFKRDETYMGQRKLNHNQFNALVENIDFDMNTKGTIKWIKHKRPAATKKAGQAKKKKDYKDDDDK

SEQ ID NO: 583 - protein, 1607 aa, synthetic construct
MAPKKKRKVMAKILGLDLGTNSIGWAVVDSDTQKILNTGVRIFPEGVEPKTIGQGDKEQSKNATRRDKRQMRRQFYRKRLRKIKLLQVLIQQEMCPLTIDGLSKWKNWSRTEKAEGRKFPDSEKFIDWIKLNPYDLREKALEEELTLHELGRIFYHLIQRRGFLSNRKGTEDSTIFTKGKPDENILPINDTKAKIGNRTLGGYLNSIACKDGEPYKNITDENGKEIRVRGRYTVRDMYIDEFEKIWSVQKEFLEIDNKKVEAKRARELRGTVNNKRNKNKIDHLKIKFGESNVDIKIDDKGKTKVITTEHISLKEFLAGRIDRIKDEAGEETLQFKSNESVLFWQRPLRSQKGLLSNCRFEDNLPVIKENGDFLLKPNGERQTRGKKPCPISHPEFELFRAYQFVNNISYGKNQKLTPEQKKEVLALINKNDGNFDFSKIPDALKLNYEKFNYGDKQKVAGNPTIKALKPLFSDDIWDKHYEEIWHCFYFYEDNDKLFEKLKKDFGFKKDIEAVKKVRIKVGYSNVSLKAIRNILPFLEKGYQYDRAVILGGVKNAFGKRWEFFKEFHDNIEKEILSILREENKDGEAIEKIKEHLASPVFNYGFEKDDPHFLHLYHHSQEVEKQDELNSLVPIVENLRNPIVQQGLNETRRLVNYLVQKYQKEFGSGFHFDQIKVEMGRELRNNKDGRQEMSFRIRENEAKNDDARQRLAEYGLQPSRENIQKYLMFKEIEERSGKAQCPYTGKVISVSDLLGRDNAVQIEHIIPFSVSLDDSFGNKTLCEANFNREKSEKTPYLFYKENPDPNLWGVTSWEAVEERAFRLLPYRKAKKFTAKREFEKSDFIQRQLNDSRYIAKKSVELLSHICNDVRVMPGQLTAELRHLWGLNNILQPVQNLGEHTFDVDGENSIAHYVVTNETGEVVSIHRKQNIRPSTNSNEILVTGNVNKKKFTSKYFKIDMETPDLPDGKYWVKLNIGDNLHVIPKYIDKPEIDEKSIVFKGNVEKGYFKNDTYGRIKADIGDGSYWAKFEILNVKFETPVKDNQPKIKRNQVMLFGNVLNGQFKCFIYQCETNLRDGKYWIILDLNPASVEFIRSVNPKPEVQVNELLITATIDEDGVLNADIDKEYQVQTDSPTGKYYVVMDIITREPKLYSIENEPPKLENGQQLIEGNIWVDKYTGEIKFDPKKNRDDHRHHAIDAITIALTEQGYLQRLSTYNAQRKEKQRQKLDSTEKFPEPWNGFTNDVARAASAILISHKKNNKTLTKTKKGFGVRGQLHEQTLYGKKDYCKSKEFTSRVSIKKLKFKKTKGQATYLDDIIDAGIQNAIYKTIKENLKNEEDKRIIEDILKRYHNIGNIKTKKAQEQEAKELNILRTKINSQVEKILQEENFFLKNEGNRYKKLKKESIEERHPVPIKKVKVLKVLGHGGHLKELSSYSKKKNRVVKGNQYVNPGNNHHILIYLNSDGKLSQEAIQLWAVIERKSQGDEIYQLPEDGVSIVTTLETNDMFILGLSNDEFESNINNRAFLSRYLYRVQNISDMYYNFRFHLASTLDKKEEWIYIQSLSAWEKLNPIKVKIDILGNIKKVKRPAATKKAGQAKKKKDYKDDDDK

SEQ ID NO: 584 - protein, 1549 aa, synthetic construct
MAPKKKRKVMSKILGLDLGTNSIGWAVVDSDLQKILDTGVRIFPEGVIDKGKGEKEKSKNSSRTDKRQMRRQFYRKRLRKIKLLQVLIEQQMCPLKVEELAKWKNWDRTKKTEGRKFPSSEEFDSWIKLNPYELREKALNEKLTLYELGRIFYHFIQRRGFLSNRKGNNESTIFTKGKPDENILPINETKEKIANQSLGKYLKSISYNDGVPYKTITDESGKEVRVRGRYTVRDMYIDEFEKIWKVQSQFLELNKKEVKATRIRELKGALTGKRNQNKIEYIKKKFGDKNVEIRTASRGITKLVTVERLSLKEFLAGKIEEVQNEKGEKKLVFKSNESVLFWQRPLRSQKGLLANCRFEDNLPVIKENGRFLLKQNGEIQTRSKKPCPISHPEFELFRAYQFINNIYYGKHNKLTTEQKEKVLDLINKNDKNFDFSKIPDVLKLTYEKFNYGDKQKVAGNPTIRALKPLFEKEVWDKSYEEIWHCFYFYEDDDKLLEKLKRDFNFKKDIATLCKIKLKEGYANVSLKAIRNILPFLKKGYQFDKAVIIGGVKNAFGRRWEYFKKFHDDIEKEILSILREDNKEGEAIEKIKEHLASPVFSYGFAKNDPHFLHLYHHSQEVEKQEDLSSQLPEVENLRNPIVQQGLHETRRLVNFLMKKYQKEFGKDFYFDQIKVEMGRDLRNNKDGRQEMGFRIRENEAKNEEARERLAEYGLQPSRQNIQKYLMFKEIEDRAGKAQCPYTGKVISISNLLGNNNAIQIEHIIPFSISLDDSFGNKTLCEANFNREKSEKTPYQFYKENPDSDLWGVSSWEAVEERAFRLLPYRKAKKFTTKQEFEKSDFIQRQLNDSRYIAKKSVELLSHVCKDVRVMPGQLTAELRHLWGLNNILQPVQNLDKHSYDVDDKFSIPHYVVTNNNGDVISIHRKQNERPETRANEILATGYVDKQKFTSKYFKIDMETPDLPNGKYWAKLNVSKSIRVIPKFVDRPETDENSIVFKGKIEKGFFKNDAYGRVRTKLADGAYWAKFQVLNAKFEIPEKNKQPKTKRNQVMLFGNVLNGEFKCFIYQCQTNLCDGKYWIILDLNSDNVEFVRSVNLKPEIKGNELLLTATIDEEGVLKADLDKEFQVQTTEATGKYYVTLEIMTHEPELYAIENVLPKLGKGQQLIEGNIWVDKYTGEIKFDPKKNREDHRHHAIDAITIALTEQGYLQRLSTYNAQRKEKQREKLDSTEKFPEPWGDFQKDVREAAAEILISHKKNNKTLTKNKKGFGVWGQLHKEYVFGKRQAPGQEKGFHRRTKITELKNNKHVGKVVDDAIRNIIEKHLQDNFNIEINNPKGYSIPDNAFFKDGEWQIFLPNKNGEKVPVKKVRIKEKIGHAAQLKSGLNQFVNPRNNHHVLIYKDREGNLKEQVVQFWTVVERKLQGEEIYQLPFDGAAIVTTLEINDMFLLGLSNDEFESNKNNLAFLSSYLYRVQKFTSGDYYFRFHLASTVNNDVERIYIKNFLEGKTGWKNYNPIKVKINVLGQIEKIKRPAATKKAGQAKKKKDYKDDDDK

SEQ ID NO: 585 - protein, 1378 aa, synthetic construct
MAPKKKRKVMGNILGLDLGTNSIGWAIIKTSSNLNFELLDKGVRIFQEGVKLESGKELSRAGERTAYRSARRIKFRRRLRKIETLSVLSQFGYCPELSDAELRDWRYKKNYPKNDAFRQWWLTDNEGDLAQKKFQKKNPYYFRNLAATQKLDMDIESNRFLIGRAFYHICQRRGFLSNRLDKNKESEGDMKQAINSLTDEMEDRTLGQYFYEKYQKGQKIRGHYTDRKRHYLEEFETICRVQNLPEDFIKVVHRAIFYQRPLKSQKGLVKKCVFEKKKSCCAISRPEFEEYRMLGFINSIKIQMPDEKEMRSLNRGERKSILPLFFRKSKDQFRFEDIAKKLAPKNQYAFCKGDKSGGDYLFNFPMNTTVSGCPVSSRFEELLGSNFMKISFAYLREDGRSSNFDIYDIWHVLATFDSTEHLQQFAEQKLQLDKGLAEKFSKINFRQGYASLSLKAIRNILPLLRDGMIYSHAVFLSNMKIVLGPAIWEDKDKRESIQNKVVAIIQKQNQQKKIAGLINSILSEPDNLKKKESDQWGYLLSEIKASIGKTSYAKMNEAERGALEKWALEKMRKMIVSSQPVAIDSIDDQIKNYLRETFNVSDKSLDKLYHPSSIGVYPPATEGENGNPLLPSPRINSIRNPMAMRALHQLRVVINELIREGKVCQDTRVHIEMARELNDANRRKGLQLWQKEKEKTHLEYSEKIKEHFKGAGINREPSRNEIMKYALWEDQGRLCIYTDKANNNIGIEDFLDNNPQYDIEHTFPKSRTLDDSMENKTLCEVDFNRKIKRNRIPAELDNHEDILERVKPWKEKYKALESQIENLRKKAKNTDDIGIRDWATQQRHKLTLERNYWKGKYHRFAMKKIPHGFKNSQIVDTGIITKYARLYLKTYFKNVDAIKGSLVSEFRKMWHIQPEDKKKERTNHIHHCIDAVTIACMTRNNRDRLAQYYARLESASNTSKTKPNVRYPWPDFVKSIHSIDKETLISHYTPNVFLRQTKRKVRVRNKIQRDKKGDPMFQQGSGPRGSLHKGTFLGAVEDITLNNNGLVETKIRYACRKPLMDLKDVQLKHIVDDRVRKIVEKARKKEKELNKEIIKQSGLVKTTDNSEKKRIEHELAILKKKKENLYTMPNKNGSPIPIKKVRIYTRITNPIGIKDQRDQSKKAHKRKYYAENDEYYLMAFYEGKIAKGKVVRDFELLNNFDAARRLKTFSPKEISGPASPAVPEAKCSGKTEIALKAILKKGQLVILKKKDSEDIFRLPPEELVKRLYKITSFEKDGRINFRHHQTAMMHSSKGDDKDQMTILKYMKINNLEPSQIDFDNPLPWLRLSRTNWEFAVEGVDFKLTPLGRLVQAGGKRPAATKKAGQAKKKKDYKDDDDK

SEQ ID NO: 586 - protein, 1433 aa, synthetic construct
MAPKKKRKVMKKILGLDLGTTSIGWALVNESEIENESSSIIKTGVRIIPLSTDESNDFEKGKAISINADRTTKRGTRRNLQRYKIRRKQLLNVLKENKLIDNKSVLTETGPNSTHSLLSLRAKAVNEEISLENFARVLLAINKKRGYKSNRKAKDDTDGQAIDGIHIAIELYEKNLTPGQFVYERLKQDKKAIPDFYRSDLQNEFDAIWKKQSESYPDILTIKLKESLKNKNKGQSWKICEKPFNIVGIKQSGTVQQKKLELYKWRTQALKEKIDLEHLAIVLQEINSQINNSSGYLGEISDRSKQLYLNKITVGQYLYEQIKNNPHTPLKNQVFYRQDYLDEFERIWETQSKNRKDILTNELKEQIRDIIIFYQRRLKSQKGLISICEFERRDIEIEIDGKRKKKTIGPRVIPKSSPLFQEFRIWQILNNLKFENTETHTSYPISELDQDVSIREQMFDILNTKGKLSPKEVLNIVIEDPEKWEIKNFKELEGNSTNQKLFKAYSQIVESSGHSVNNKKLKESYADIFKTIGINPDILEFDTELKGNLFEKQASYQLWHLIYSYEGDNSETGNDKLYELLYNKFGFDKDYAKLLINISFQDDYGNLSTKAIKKILPYLKAGHEYSQACLLAGYNHSHSITKEDNERRPLDDILELLPKNSLRNPVVEKILNQMINVINAIIEQYGKPDEIRIELARELKKNAEERAEMTRQITKTTAEHNEIREKLKEIYPFNTGIRITKNDIIKHKLREELATNGYKTIYTNTYVPLEKLFTKEFDIEHIIPKTVLFDDSFSNKTIAVRDFNRIKSNKTGIDAVAEKYGNDSDEFKRYVNTVEKLYENNKISKAKHKKLLMTADKIPDGFIERDLRNSQYIAKKAQEILRKIAKTVTPTTGIITDKLREDWQLINVLQELNWEKYAKLELTDFEFNKEGKKIPVIKDWSKRNDHRHHAMDAITVAFTKPSLIQYFNYLSARKNEKHKKHSNIYAIEQKETFVNDKNKRLIKPPIPIEEFRAEAKKQLESILVSFKAKNKVVTRNINKTRKKSGENKKIELTPRGQLHDETIYGRSCHYTTIEEKVGSKFTKDYINNVAIKSQKEALLKRLNEFDGDAKLAFTGKNSPSKNPIYLDEHQSAKLPEKVKFVVLEESYTIRKEISPNLKIDKVIDKKIRKILNKRLKQFNNDPQKAFSNLEENPIWLIEPTEKSKWENPDKPKSHELGIPIKRVTITGISNAEALHNKKDHFGNKIADSNGKVIPTDFVSPGNNHHIAIYKDEEGKLYEDVISFYDAVTRVNQGSPIVWHTHPEHPDWELMFTLKKNEYFIFPDPGKGFNPSEIDLMNEENYHFISPHLFRVQKIGKKDYWFRHHLETKIEDTKKLAGITYKRMQSLESIKNIIKVRINHLGQIVKIGEYKRPAATKKAGQAKKKKDYKDDDDK

SEQ ID NO: 587 - protein, 1433 aa, synthetic construct
MAPKKKRKVMSSVKLGLDIGTNSIGWAIMKKEDGKYDFLKKVDENNEEIPTKGSYIFPKGVDAQEKSGAAIRRGFRSARRRTERIRRRKAATLKVLSENGLCPALSKEELSDWRYKKKYPCDNDEFIRWQRTGTKGGDRKSEKKKQPYYLRYLAATKDSLMNSEEGCYNLGRAFYHLAQRRGYLSVEEEQADEAIELFKQSLSTLINEQDTVLAFGEPFEAIADQYKSDAKVKSLAGKIRRQLKKKLSFLEIKRFVELQLSAKENLGKVASGINELTQKIEESGQPTLGCYFNSIYAKQHGNGKVERIRGRYIDREKHYLNEFNYICDKQNLDDELRGKLYDAIFYQRPLKSQKDLVAKCPLEPKRKRIAISHPLYEEYRKWESINRIKIKTALDDRLRPLNVSEKELIASDFDLVGDVSFEKLAEKLCGGEDFRYIKDKEKLEAEVEFNFPITTTFSGCPTIAHLKKVLGKDNTGKYWFYKLPLLNTGYKDEKDKKQISIEDIWHCLFVDSYGEKTKQQAREDFAKKHLEWVDAEKFAKIKLRKGYGSLSKAAIKKILPHLREGEIYSHAVFMANTEQVLGRQISQEEQEAIILCIREAIDSHDYEKMVNAIVNRYLDKYKENGDSYGENSFSRRVHEDAIKSEIEEWFSIEKLHLMTTAEYDGLKSDCFYKFVKQVNNKRPKDVEYFKTETISSKIKDALQKKFPEDTIQIDFLYHPSAIEAYPKAGKKLGNPEISSIKNPVFNKAMHQIKRLVNKMIEEGLVDKDTIVNVELAREINSASYRRALAQYQRDHKTIREWAKRKIIECYKEKERDNITPSDTQIAKYILYAEQNGHCLYTGETITPRKFFTDQRFDIEHTIPRSKWNDNSMVNKTLANAEFNRDYKKTKLPANMELTFRNEKISRESIIHNRNTWLKSYRISGNEVQFKESLSDIKEEVRKFKAAARAAANDAIAHEELMVKVHYAKFRLEYLSKKYRTFEREEVPASFNNANLVDTRLITKYARAYLNSYFKKVNVINGQLTDTLRKTWGLQGEYEEKDRSNHIHHCIDAVTVACIEKGTANRLSEAFHCYEQGKVPKVILSPPMLHFDNRMKNLKHEVFIYHRQADRIKPLLDELNKENPKKLNLRGALNKPNPYGCIKKDDALLYVQRSLVKDITDKDISSIIDDMLKERIQDLIRRNGNVKIDKLTKDGVLVLPEYTYTSDKGKVKVIKEVVLRKIRLKAYKQSQYPLKTYRKIDQSVTEYKRNIYVLKEKESNYEARIYGDLVPDNPDGRIKFSRREYFLINTKDIVKNDIMIRPQYPFLFSIHTGDPFIIFDRHPDEIAWTDKKDLNARLFKIKKFDDDKNIILQRNSHSHSNKDVYAKEDELDNKLAFLLKKVPSSFRAVPTNIDILGRIDISYSKNFIDDKRPAATKKAGQAKKKKDYKDDDDK

SEQ ID NO: 588 - protein, 1574 aa, synthetic construct
MAPKKKRKVMAKILGLDLGTNSIGWAVVEKEDGKFALVDKGVRIFQRGYGDEHQDSSRAAERTLHRGARKLNYRRKGRKIELLRLLGAEYHPFTEEELIAWHKSKKYPVRQELIDWFKLNPYDLRKKAIDGGKLSQKELGRIFYHLTQRRGFKSNKKDSTSVDGESNGNERNLPKDIVLDREYRAKNGDISLSQKLYNDLSEGKKVRNSSEKNNISRITLEDDFKGICKNQNLNNDFIEDVRRTIFDARPLKSQKGNVGRCVFEKGKPRCPISSVEFEEYRMYSFINNIKVKRKDEPKKEFKSLYEQTYFELDIEKDIVPTFFRQKTSFKFQDIRKKFDKHDNADLYEFNYKDNITVSGCPVSAHLKAIFGNEWKTKIFKRNGVNSKGNEIEYNIFDIWHLLFDHYIQDKKDEPLLKIAKEIFELEPEQSKKLLEAPITQGYTNLSFKAIAKIIPFLKKGFRLDQAIIFANIPTVLGLDKDDDLPDDIYEDILDIFNNYGDEKKRNTIVNDCISTFRNESKNAHSNYQIDDIDKQIIEKQAKKKFGEKTWNDLSEVEQISILDELGNNFENQLRQGGVGGQFIKTESIKQKVKDYLVNNLGIATQLTDKVYHPSAIELYEKVEYNDKGLRLLGSPIIDSIKNPLFMRSMCELRKVVNELLKTNIIDNETQIIVELGRDVNDYNMRKAIERYQRERETENEFYKHLLEEFYKEKNIKKTPSVEEGQRVKFWVEQLDDEQDSEAFYTKLEEHTAQYTKKEDRIKLPQYAIEKYRLWREQKGICPYTHNPIGMADLLNGNKYDFEHTVPLSKSFDNSLANKTIAESHFNRYKKGNKAPFELEAEDRKKVAQFIERWEIKVEELEKRIEKQKGKAKNIQDKERKNQNIQERHYLRLHLKYWKTKVNNFKIKEITDGFKNRQFADISIINKYALMYLRSCFDNVSNISSRFIDEYRTIVGYEKSRNYHTHHTIDAVFCACAVDFARRKPDALAKLERYYKINNQYKKATWFDKEGDEAKISSLKEKLEKAKDDLVPWSQFRDDLENLGNSVLVSRRFQDNLKKQTKKKIRSRGKVEHRAANIDGDGNVLEWKYKTDIHGNKIPVKGKMCDENPDFVLHCFKDGKKKRLEVLGDYPEYSEDTIYSQGYLYVRNKNKDVCYEKEARYTWHNDRSDAKTNGLRRRFHEATLYGALKKPELNDEGKFKFDENNNIILQKNKNGEDIVFNNIRKKLEDARKATNSIVDETLRKIITDDNRRSKLLKPKDEERAILFTIPPKKIMKQVLAVIEEISKCNSQEEVVLLDDKKRKLRLQYRSEATKIGRVRCFKSINPISIKENSHKAMKDGSEKESMAHKHYALSVKDMTYAAAIYEFEKIDKATGELKKVERHLEIVTDYEVADFLRGDKVQNSPFPANVKFKDGKQEVLVSNPKIIQSGKYVLFYKDEDEKEDFIKCINHNDISTELANTFSKRLYRIDAIETGPPLRINFCIHNSAMKKKSTDKNEITIQKYMDENKLKDSQLKLDDSVPWYRITKKNWNFLVEGIDFRISPIGKIERIKRPAATKKAGQAKKKKDYKDDDDK

SEQ ID NO: 589 - protein, 1379 aa, synthetic construct
MAPKKKRKVMSIAEKNNSEYYLGLDIGTDSVGWAVTDLDYNIQKFNGKAMWGIRLFEAGKTAAERRVFRTTRRRIQRRKHRIELLQELFDSEISKADTNFYLRLKESKYWVEDRTLGQTNILFNDPEYTDKDYYKQYPTIYHLRKELMTSDEPHDVRLVYLAIHHLIKNRGHFLFEGEGRKDVSSFKVIFRELCQSMHDEMEIVLEAADLDEVEAVLKNREYGITDKKTRLNKLLTIDDEHKKEQKSIIALLAGGKTKVDALFGEKTSEDSDVKDITFAGDKFEESFDALSIMLGDKMFCLEKMKAIYDWSILEEILQGEDYLSYAKVATYEKHKNDLATLKKIMKKYRSDEYDACFKDPGKKDNYCAYVGMAKKGKKKLVLEKKCSQEDLCKYLGKVFKDVKQNDPDLQYLMAEIQRGTLLPKQVNKDNGVIPHQLHLEELRMILANVKKYLEFLNDKDDSGFTVSEKIEKIFAFRIPYYVGPLNAHHKSLGHCWIVRNKGMENQKVLPWNFDEIVNLEASATAFIRKMTSKCTYVIGADVVPKNSLVYSEFMVLNELNNVKVNGELLPVELKEKVFEEVFKRVKRVTGKRLRDFLIAEGAFKKGDELSGFDQNFKGSLTAYLDFKRILGEKKIPKEAIEEMIQAIVLFGDDRKLLKRRVEKRYGELLSKEEIAAICKLKYTGWGRLSREFLEEIYVVNHKTGEMINIISMMHGTNANLMQLLSSEYRFTEALEAYNEERQTDHSDIAYGIVKDLYVSPAVRRSIWQSLKIVKEIAKIKKAAPKKVFVEVARENAEKKRTVSRKNALIALYKNCKEEERDWIAELDAKTDHELRRDRLYLYYTQMGRCMYTGKPIDLNRLFDTNVYDVDHIFPQSKIKDDSLSNRVLVERKVNAKKSDVYPLPEEIRNKNRGFWTMLHRKELISKRKYDRLTRVTPFSDSELADFIARQLVETRQSTKAVAQVLKKVFPDTDVVYVKAGNVSRFRYDFKMIKVREVNDYHHAKDAYLNIVVGNVYDTKFTKSPLNFIQGKDGKNYSLNQMFNYDVERSGVIAWKAGEKGTITTVKRMMKKNNIQFTRHAFEVKGGLFDQTIMKKGKGQVPIKSSDVHLSDISKYGGYNKAAGAYFFLVEHTVKKKRIRTLEFAPVYLAKKLENRSALLEYCKNELNLLESRILLPKVKINTMFEIDGFKMHISGRTGKQVIFKGAEQLCISEQYGLDIKKINKYIQRCKLARENLPVTAFDGISTHNNDVLYSVMMQKLKDTVYGIHLSSQLKNLEKGKEVFGKLSLKEQCEVLMEALNLFSCNSLSANFKLINSGASCGTLKLSNNFSNRKSFILYNQSITGLFEQKVDLLRLKRPAATKKAGQAKKKKDYKDDDDK

SEQ ID NO: 590 - protein, 1160 aa, synthetic construct
MAPKKKRKVMNNPKFILGLDIGISSVGWAVIRDDGSNSRIEDFGVRIFESGEKNQGKNRKSQERRKYRSVRRLNRRRKHRRDRLLNYLHSINVLAITDLEEFIRRAGFNTYELRVRGLTHKLTAIELGYVLINLSNHRGYREFYDEDNSKHSEKGIIKTACSNLDEIYNTSQYRTIGEMLYEDKAFKDIENPTNKFPVVRNHRGNYRFLIKREYIEAEVEHVLIAQSKYYPQLTSQSIQDIKNIIFSQRDFEDGPGNPSDQSRRYKGYVDANGECPSIGQCPFYPEHKRGFRNTLVGDIFSLINILSQYSYLDISTGEIGISDVAARALIDNAIEFGFLTVGDMHSILNMHGFTVITKERATKTVKAFQFIPKIKTILEQSGLYWPRWIAEKQFDIETPSGLHRLGEILSKYHTPRRKRNELENSKLVNDSFIALSMSKSFNGTTGVSYRYMIEAIEAFRLGELYGDFQARKVKSFNELNIRTDKQIEVKKLPPITDRDISINPVVFRAINETRKVVNAIIAQYGNMSSINVEVASDLGRSHEQRLEIIKRQKANEKARQQLIAEYQELFPQEKISSDALQRYRLYKLQGGKCMYSGETIDLPRINTKMYEVDHIVPYSLILDNTINNKVLVLSRENQNKGQQVPLQYMRDKKQRDSFEKRIEEMLKNDKVSPKKYKYLCLRDLSDEETLNSWKSRNINDTRHITRYVVGYLQSSLNFQSKVKNNVHGIKALIVSRFRRKWLSNTIWGAEDKDRGNTHLHHSVDAVILANLTPAYVEVASDYLKLSGMIRRNNGKMSAECEDYLARCIRKMQTHYGFKPSYTDGLLRAQAKRGQIPTLIRNLRSEILVRFIDDPSLESDYRKGVMDFYGDNHFAERLRMPIVSYKLEKCYRGPVSADNPISVREIDGELYQINRKSASLVKRQDFSKGKIVSEDADLIKTLDSIFTGKSDKYSLGDYLNDNNLSEFKTLLGRRIHKISVREKLGRQEPGIKKIQPGNQTLLDIDKYYCLELYRDKANKLFVRGLRYFDLVKKNKKLYLNTPYPDNYGEHLMYLYTNEYIHVFNRQEQLKFAGNYRSIKNINSRRFNQHSNRPFQQDVTVFSIAQTDTIKKYDVDIMGRIRGEIKCGEPFSLVPGKKKRPAATKKAGQAKKKKDYKDDDDK

SEQ ID NO: 591 - protein, 1709 aa, synthetic construct
MAPKKKRKVMAKILGLDLGTNSIGWAVVETLNNKDFGLLKEGVRIFSEGNTAKDRTAKRGIRRLYFRRRLRKIETLRILSECGYCPTISTEELNNWRKHKKYPIENKDLINWLRTDNIGGKGDKQQQIKNPYYYRFKAVKEPISKYNVGRAIYHLAQRRGFLSNSLSQESDELIVLVTNKIKEKIEETENKEEIQKEIKEIFNGLDEEFAKDLKVKKLTKEIHKLKGENFIQDVEKLINKKENLGVVKAGIEQLSKEIQISGHEYLGEYLYFLYQSHSNVINNKQSVEFYNSFVEKFKNENDAKTELTNKIRTRYIGRKVHYLREFEQICKVQNLEKIKTKNGKTLKEELENALFYVRPLKSQRGALGKCKMQKDKSRCPLSHPTYEEFRMWQFINNIRYRNRKIESSQFEHLSYDDKMKIVPLFFRATNFKFNEVIAKIDPSLETYEFSHQKQFEEKPKDSLTVESCPTIARLVSIFRHKGNWEDIKKTTFRYCANDRDGNPKVDSNNKPVESKIDIYEVWQILYRSKLTRNNENYLRQFGKEKLKLTDDKKASDFQNLAKRLKEGYAMLSLNAIKKILDYMLPQNENRPGYIYSHAVFFANMKSIVGKSIWQENKDKIIADIIQKLDLQQKANDKNTFVNSLLRDFFNQPDEDKHFPYDDYTLDNSEKKLIEIKAIEYVGSYTWKESPEGFKKEFLNFAENEYQLFLRNVKINGNKSDYFKSVTRKDKVIKDYIKASYLEKLSIAELRETFNIKNLKLSKEEIVDRQLGRLYHPSEIHLYPKPKVIFDVKGNEKLIMPSPYLPDIKNPVANRTLHKLKGLIEYLVDNNIIDERTNIHIEVAKEINGANMRNAITQFQRDRQQENEKYRRLLEEFEKPVNIDTTEKVVLWKDQLENQTVFYDSLKEFIKLKDSKKLDNTQKKELDVLKRRLWDEQKGICMYSGESISMSQLFQDGVVEIEHTFPRSRIPDNSLENKTIALREENQNKGSKIPYELGPEKHAKIKGRLYFWKNKIDDLRADYQRLEKLVRQDLFSTPEKRDVAIQKKFHKRMELEYWTNKNGTGKYDRFLAKEISKKFKNSQLNDTRIITKYASKYLETYFTKKPFISQGVLVDTFKREWGVLRQDEKKSRAKHIHHTVDAIVIACMTYRFREIILKRYYKRKERGENVSLEVPFKDFANRLRNEIEEEVLVENTFKDKTIKQSLKKVRHRGKIAHKEKYKKDADGNFIKDKRNRKIVTKRYYRLKKGRQLPSNQIEGLKEGEDYFAEVKKNGKTCYYEFVYDKNGQKIQELVPIYSKGNTIRERIHEDSFYGAIKQFDIEDGKLQKGEDGKIKLKQDKDEKDKIFYVIRKPLIYDSSGNKGFKNIDQLKTTNIVDPVVHEMLLLQANEAENFSKSFDDGYYMLKPKRIDNKIEKDENNNIVFERDNEDKYKKGPCIKSVRIFSKLTDPIKLKRQVFESKIQHKYKEMYYVNNKNNYLYVVYENSMKKGELKAVVFSLFDSVKGERESLELESRPYPDSIEVLIGKNRINYELLTRNNRDVVLKKNLHVLFKIDKEETIEDILELSTKETHNRLYRMEGLRKDLVYDEENKCYSRPGTTGQIELRHHMTGNKFNNNSEIEGLQDIYRRYFGNNKKMPDSVTEFKVEYPFPFLLMSLNKMDVFIESIDFELTPLGEIRLVNEPAKPKRPAATKKAGQAKKKKDYKDDDDK

SEQ ID NO: 592 - protein, 1410 aa, synthetic construct
MAPKKKRKVMEKILGIDLGTNSIGLTLREDNEFKWYGVYTFKKGVGEGKAGEFSYAAERTKHRSTRRLYNARRYRKWETLKVLIENDFCPLRKGNLDKWKHYAKGIGRSFPIDDELFQQWIKLDFNGDDKPDFTSPCQLRRILIVEKLDLSIAQNRYMIGRALFHIAQRRGFKSSRKNGQNEKTAVFKGSTETKTIGRNEYENLIIENGSLGAAFAALEDKNIRIRNRYTLRSDYQYEVKKILNYQNIENKDFCENIEKAIFFQRPLRSQKGLIGKCTLEPNKSRCPVSHPKFEEYRAWSFINNIKFLNKETNLFEPIPLALKQKIYNDKFFYKSKREFPFKEIRKIISINGGKEWELNYSSKMDDVSVPSCFVSARLKSVFGENWENYHKQVTRANKNGIKETKIYTIEDIWHILFEFEDEEYFKEFLSKVLDLNDSQIDELCTLFNSFPVGYANLSLKAIKNILPFLRDGNIYSESVILAKIPEIIGKKIFEDNKNELLSAIKEKVAHIRNKKNNVSIVNNLIFKYYALDYDQRFGWKDFEYKLSDSDLNDVKSTIIEFFGQKTWNTKTEDEKQTIISKVSNLYQDFFASEKREHIAQPHLVNSIKEFLLESFVINEKIVNKIYHPSQIDIYPKKEGQQYLLSPKTAAFKNPMAYKTLYRLKDVINYLIEKEIIDNETRIVVEIARELNDSNKRWAIEKYQRDREAENIEYANAISELLKDPEFSGIADPNSNSDTDKFRLWLEQTENLEDTLKEIQNINKNKSLTVNQKDILKYRLWKEQNCTCLYTGKIINLTDLFDTNKVDFEHTIPRSKSFDNSLANLTVCYADYNRNVKNNKMPSELPNYNEEWNGYSAIKPRLESWEKKVDDLFKQIDFWKFKSKIAMDKSTKDDAIRQKHLRQMQYDYWKNKVERFKQTEITQGFINSQLSDTQIITKYAYHYLKTVFNKVDVIKGSNTADFRKIYGINSKEIEKNRGVHSHHAIDAAVLTLIPSARKREEILKKAYLYAEKNFGKQYLEQPFKGFNYGMIIEIEKNILINNIADKDHTLTPGRKIVRKRGRVVWLDKENKKPKKAQGDSIRGELHLQSYYGKIKIASKDENGRLIRDKNNDIVYNQIDGKDEIWMVIRKPIDNVNFASDIVVDQHLYNFLKKQLESGTKQVDLVDFQGRKLRHLRCRVKAARGFMNPDNATVVKEQVYKSRKDYKNYIYTDSGENYMYGMYENENGRKIIAINKFEASRFSLNQNFDSREEIFKIKEPVMIGSGKKSKEARLIHVFIPGQKVIFFFENKEELKELMPNKISSRLYYIKRFHQAERGSIVFQHHIEARNDEELSKVFGVIGKNGFSVDKLNKNFSPPRILYTPNKDIFIIEGKDFDFSLDGSIKFKYKRPAATKKAGQAKKKKDYKDDDDK

SEQ ID NO: 593 - protein, 1562 aa, synthetic construct
MAPKKKRKVMAKILGLDLGTNSIGWAVIDATTEDGKVKRYNFIADSGVRIFPEGVEPTTIGQGDKEQSKNASRREHRQMRRQVYRKKLRKVKLLEALIELKMCPLSIEGLYQWSKWNKSKKTEGKLFPTEPKFVAWLKMNPYKLRSKALIEPVELMELGRIFYHFIQRRGFLSSRKGNDDGAIFKGKENMSGIDSTRELMNGKPLGKVLFDISYKEGEKYNQKKNNDGNELRVRARYTQRDMYVEEFHKIWKQQASRLGLEQKTIEIRKSRFLKGSLTARRNRHKLENYIEKYGKEHVLIKGNRVITEEQVPLKQFFAGEITEHDKQLRFKSNESLLFWQRPLRSQKNLLDNCRFENNLPVLMENGEFRRKGKDIVRRSKKPCPLSHPEFELFRSYQFINNIKYGKGQFLTADQRHLVLEILNSKDGNFNFEEIPKALNLTYEKFNYDNDQKIQGNTTIKKLKSLFPEELWIESYEDIWHCFYFFYDTEKLFEKLKKDFQLKTNDIDKISKIKLKDGYSNVSLKAIRNINSFLEKGYSYSDAVILGGIKNAFGQRWENFSDFYLEIEDTVRRILKEDNREGEAMEKIKDYLADPINSFGFSNNAPAFTQLYHHSQEVVEKEKQDFLPELENLRNPIVQQTLHEMRRLVNALLVKYKKEEPGFSFERIHVEMGRDLKNTKTKRRELTQKIRENEKKNDEARKRLEEFGLRPTRDNLLRYLLYDEIQKHISGPVLCPYTGKVISMSDLFSGGNVVQIEHIIPYSVSLDDSFNNKTICEANFNRMKGEKTPYEFFLVNPDYKLWGINKYETTEDAWKEISERAFNLLPYGKAKRFTSKKKFEKSDFIERQLNDTRYISKKAVELLSSVCDNVRMLPGQVTSELRHLWGINNILNPVLGIENFDADVQEYKRIPYYVVTDENNNVLNIHPKTNDRPHVESENLVLAGRVNKGTFSTKYMQLKVDTPNLKDGDYWAVVNISEPHSFQKVFSERPSDDENHIVFKGRIEKQFFNNDTIRKKIKTDETEDGTYWAKFSIVNKELKLAEGKGKLKIAGSKIALFGEVKNGRFTCHIYQCETNMPDGKYWVLLELDFDTIDFIRAVNTKPEINEHQILSYATVDEKGFLTADTDPGYKKKVTISAGRYYCIFDIKTIDEQLYPMENEAPALSKGTRIKEAIVWVDEATGEIKYDPKKNRDDHRHHAIDAITVALTEQGYLQRLSTYHAKEENAKRGIDNTEKFPEPWDGFSNDVKKVAASLLISHKQNNKVLTKISKKIQKNGEVKKSIGFAARGQLHKETVFGKRRSPGHSEHSYHIRKDIRGLKDKKQINKVVDDTIRERIFNHLRENYGIDTSKDNFSVPKDAFYKDGEYSLFLPNNRGGDRVPIKKVRMRENIGNAIQLKNNIKQFVNPRNNHHVLIYEDFDGNLREKVESFIEVVERKRNGDLVYQLPKEDGRKIIATLEINDMFLLGLGKDIEIDTASTDLLSKHLYRVQKVSSSYYTFRHHLASTLDNKNEEIYIQSFGAWEKYNPIKVKIDILGNIKRIKRPAATKKAGQAKKKKDYKDDDDK

SEQ ID NO: 594 - protein, 1511 aa, synthetic construct
MAPKKKRKVMAKILGLDLGTNSIGWAVVELIDGSFRLIAKGVHIFQRGYGDEHQDVSRASERTRVRSARKLIYRRKGRKIDLLRLLGSEYHPFIDDELTEWHKNRKYPIRTEIQEWFKLNPYELRNNAIEGRKLSRQELGRIFYHYTQRRGFKSNKKDISSYSNDEKGVKKNLPKDVQYHEEYLSEFGETPKSKVLYERHKNAERIRNTSEKNKISRITLQEDFLQICKKQVLLDEFTEDVRKIIFDARPLKSQKGNVGKCVFEKNKPRCPISSVEFEEYRMYSFINNIKIKRKNEDKKEFRSLYEQNDIDNAVELIIPLFYRQKPSFKFEDIHRKLDKAGLYDFNYKDIMTVSGCPLSAHLKSVFGDNWKSIRFDNGKNKNGEDKYIELKDIWHMLFDHYMQDKDDEPLIQIAQTKLELSKEESEKFIKAPVKQGYSNLSYKAIERILFFLKQGYQTDKAIILAKLPDILAKHNKRDCINQIIEEVEKIFEIYSRRKKRNEIVNACISVFRSDFKNAHSNYKLDEFDKEIVVQKIISIYGNTTWSNYSLDEQTAIIRDVENAFENQLRSGNIGGTYKKSMSIKQHVESFLIEEIGIDKNTAAKLYHPSAIDFYPIVEPDVNGKRLLGSPLKDSIKNPLFMRSMCELRKVVNELINTDFYDDRLQCMEPLIDSETLIVIETGRDVNDYNMRKAIDRYQNERETENEFYESILIEFFKETNKNRIPSEDDKRKLKFWVEQHESVEESEDFYNKLESHTYQYTKSADRIKLPKDAIEKYRLWKEQNGICIYTKNQISISDLFDDNKIDFEHTIPLSKSFDNSLENKTISEAYFNRYIKKNKIPYELDKEYINNVSGFIIRWEKKIEEIEERIENLKRKAKNLQDKESKNENIQQRHYLRMHLKYWQKKVNNFKAKEVTDGFRNRQLVDIGIINKYARLYLKSTFDNVFSVNASFVDDYRALIGYKKNRNNHIHHTVDAIFCACSVEFVRRKPHALRTLEKYYYLKDELQKAILFEEQPNEQTKRLKEELEIVHENLEPWKGFAKQLDELKEEILVSHRYRDKLKKQTKKKIRIRGKIVHRAEKIQKLDDNKIKVVEWKYKTDIYGKKIPVKGRLNDENPDFVLHRFRDDSKILIEVLKSFEECKENENTLVLKGYKYVRNKAGEIVYEKEPRYTWHNDREGSLTTGVRDSLHKEMLYGRVKRPAKTENGEFVKDSINGVLMEDWYVKRIPVESLDANDIKNIVDDGIKARIQKHGFKNVKNNGEIILPAEENLKEMTIKRLRCRQKKGRGFLNAIPLKENSHLSAKHESRVERFGKDYKQMSYVDNDGNYQLGIYSDGRNTRYKFLNNLDASELLVSNGKVVKVQDNEFFSVRGKKIFLELKQVLHQNLYAILLQSKESINDVNWDSPNELMRRLYEIKSFSESDGRANIFCLHNQCADNVSKLDLKIGEFKLGIPVVKYIRFRHTNFNALIEGVDFKLTPLGEIKRLKKRPAATKKAGQAKKKKDYKDDDDK

SEQ ID NO: 595 - protein, 1107 aa, synthetic construct
MAPKKKRKVMSYILGLDLGETSVGWAVLEERGNKPVALKDAGVRVFPKGAEVDEKRGISTSESQTRRQKRSQRRIIRRRSDRKKALKNLLLSHALLPSDNEKQESLLQADPYEIRTRGLDTKLRPDEIGRALVHINQRRGFKSNRKSGDLKEEGILATSIGTLAKAMEESQARSFGEYLYRLDSGYDKGAGKENTRERQGVALRNRGGGYEHLPSRAMIEDEFNLLWSAQAAHHPGLLTKDLKRAVEGIIFYQRSYAISEDRRASWGKKFVNAKMAPQLKHCPLFPEEYRSPAGTWEAQRFRLLKEVNNLEVLDEYGKGRKLDTAERKTLVDALGIEEKQTFVQLSKLIALPKEHRFNLEAGERKHLDGNKFEVQLIKGYYGKKTKKEKEAWLALDGDFKGHLRELVANVEDADQFTETAKELGLTEKQIEGLRTVQPTGNYLAYSYKAIQNLLQFLEDGLDEYHAIQKAREQGVIPPSNEPDEYDLLPLPPDLPNPIVTRALHETRKVVNLLIKTYGKPSRIVVELAREVKHGPKRRQSISRTIEENRKRNEKVKAWYREHGVLTPTRDDVIKYKLWEDQNHLCVYTGKTIDQEDLLSDQNVVDIDHILPRSRSFDDSYRNKVLCVTQANREKGQRLPVEWLGGPGNERFDKMLVRLKNMPSIGHDKFARFNQEKIDTEHAIARQLVDTQYISREAVAYLNQLFPKELRVGEKAVGTVIGKLTSDLRHVWGLNTILSGQEDLKNREDHRHHALDAIVVACATRKHVQELAKRSKWGQDPSEVPPPWKRFRDDVKHMVDSRKRTWKLGDQEITTEGMLVSHRAEKKILGGFHQETNYGPTRDPEWFVRRVGVRSLTGPMIKGIRDDAIRRILTKHCEENGYNPEQDGRTIPPKVFQTLPTMPSGVPIRSVRIVERKQKGIEVFGGKNGIAPRAVLLGNNHHLEMVERDNNGVKEMLVCIVPTLEAARRSRIRKEPIVQRDHGEGMTFKLSLARKEAVVFHKNGKHHLCYITIISGSSTLSKGSGSMDLTFRTHNDARMPKKDTKGKALKITPFARIQSFGAWHELEPIKVAVDPIGRLSKANDKRPAATKKAGQAKKKKDYKDDDDK

SEQ ID NO: 596 - protein, 1388 aa, synthetic construct
MAPKKKRKVMSKILGLDLGTNSIGWAVVETENNKTFSLKNKGVRIFQEGVKIEKGVEGSKAAERTGYRSARRLKFRRKLRKIEVLKALIKYDLCPPISGDELNIWRYKKIYPTNKEFRNWWLTDNNDNRADRKKQTKNPYYYRSKVATDQLDLTKQEDRYILGRAFYHMAQRRGFLSNRLENTKESDGAVTQNIKQINQQKGDLTLGQYFYQCYCKGEKIRNQYTDRLEHYEQEFNHICKLQGVSDEQKNTLHKAIFYQRPLKSQKGLIGKCPFEPKKSRVAISHPAFEEYRMLCFVNSIKIKLPEDDKLRFLTEKEREKIIPVFYRKSKPHFDFEDIAKQLAPAKQYKFYKAKDKNPEDYLFNFNMKTTVSGCPVSARLKSIFGDEWKELQIKHERKDHSKSIIDIYDVWHVLMTYDSEDKLFEFAKCKLGLGEDKTKEFVQFNLPQGYGSLSLKAINKILPFLQMGLIYSHAVFLANMANVIPPILWNDPENKQLIINEIKELIQSQNEEKQITDIVNGLIKINKDSNAVWSNEAERAFKNDLLQNIKAYYGSTKFDSFSIAQKSSIETNAFELLKTQMQKKNGVGEFAKVKRIDERIKDFLIDNFNDDIKPENLYHPSAIETFKPAQKNNEDKYLLGSPITSSVRNPMAMRALHQLRKLINQLINDDVIDEDTIINIEMARDLMNANERKALQNWQRRREDERKKYAAEIVKHYKASGINAEPSNNDILKYQLWEEQNHICLYTGKNIALHQFLGSNPEFDIEHTIPQSLSFDNSQVNITLCDSKYNRTVKRNKIPYELNNPDILLRIHHWKKEYENIDKDIQKCIKNARGASTKEDKDRHIIRRHQLTTQRNYIREKYQSFTRKDVPSGFKNSQLVDIGLITKYARLYLKTVFDRVNTVKGTTVADFRKLWGLQNAYETKARVNHIHHCIDAITIACMTKPQYDKLAKFYHDWECLKEEGVDKKPVFEKPWPTFTEDVKGIENEILISHYTPDSFAKQSKKLLRKRGIIQKDKNGNPIVLKGDTVRGSLHKETFYGAIERTQANKKGELEKVIKYVVRKKVSDLSDTDVKNIVDDRIREIVGNARNEEKKIQKEIERLKKDLQKAEEHEEPAINDKICVLQTEIEQLYSLPNKKGAPIPIKKVRLLQPSVTNPLCIKKQRDVSTKKPKEYKQNYYAANDGNYLMAIYEGKDAKGKIKRDFEIVNNITAGEFFKQSVQGDLKPQGISTNGGLIPKQKENGKLVLPYKSSIKIGTMIILWEKSPTEVFDLELNEIKRRLYKVVGLSAQKLKISGKSYNYATIVLRHHQEASSSSDLKTYDGAFKRDETYMGQRKLNHNQFNALVENIDFDMNTKGTIKWIKHKRPAATKKAGQAKKKKDYKDDDDK

SEQ ID NO: 597 - protein, 1335 aa, synthetic construct
MAPKKKRKVMAKVLGLDLGTNSIGWAVVETEDNKNFELCEKGVRIFQEGVKIEKGIEGSKAEERTRYRSARRLKFRRKLRKINTIKALMEADYCPKLSDEELNNWRFSKVYPTNVEFRTWLLTNDSLNKNPYFYRNLGVTRNLDLSQKENRYKIGRAFYHLSQRRGFLSNRLEGTKESDGAIKKEISELTQEKKDKTLGQYFYAKYNNGEKIRDHYTHREDHYLEEFRRICKVQKIDSGFKSDLEKAIFYQRPLKSQKGLIGKCPFEKNKPRCSVSHPLFEEYRMLCFINNIKIKTPDDEKLRFLNPLEKKEIEPLFYRKSKEHFDFEDIAKLLAPKKQYKYYKSREKHSEDYLFNYSMKTTVSGCPVSARFESIFGKNWKDLKIEHTRKNDGKLSFIDIYDVWHVLFTFDNEEKLTEFAQAKLCLQDEKLKEFVHKIHLKHDYASLSLKAIKKVLPYLREGLIYSHAIFLGNMGNAISQEIWSQEENRKIIQQEILEIIKNQNQEKQIIEVVNGLIKKCKDNKWYWSEEAKEKYKKDIEKNIISVFGTSRWNKLEFEIQNDIVNNALNKFKEQIQKQNGKSGFLQIETIDERVKSFLVGNFDAEKEDLEKLYHPSAIEVFKQPLRAEDGRKYLGSPMVSSVRNPMAMRALHQLRKLINELIKQDIIDERTKINIEMSRDLKNANERKALQSWQRDREKLHKEYSSRIQEHFNSEGIKREPSDDDILKYQLWEEQEHKCVYTGSSIGVSDFLGNSPSFDIEHTIPRSLSFDNSQQNKTLCQSRFNRNTKRNKIPSELSNHHEILERIENWKKKYEELDKQIQKQVIRSKTAATKDSKDSAIQRRHKLVEERNYWKGKYEKFAMIDVPSGFKNSQMVDIGIITKYSRLYLKTLFDKVYTVKGNTVADFRVIWGLQKEYEKKARVNHIHHCIDAITIACMSKQNYDNLAKFYHESEERSIAGDNKKPHVAKPWPTFSEDVKGVEKEVLISHYTPDNLHKQSKKKLRNRGKIEKNIQGEIIYQKGDTVRGSLHKETFYGAIKREITNKKGEKEEKVLYVVRKPIDSLSAGDIKNIVDHTVREKVQAAINEKGIKQALNETIWMNQEKQIPIKKVRCYAPTVTKPIHLKNHRDLSKHDYKHSYHVANDGNYLMAIYEGEDDKGKVKRDFEIVNNLKAGEYFKQSVQEVLKAQGINHLEGLVPPSKYIKNVEAPLKQIIKTGTMVLLWEETSDEIWELDNNQKNIRLYKIVKFDKSGRIYFRPHNEARPASELKEVYNLNANKQCEQLRLPVNKFNALVEGYDFKINVLGQIEKLKKRPAATKKAGQAKKKKDYKDDDDK

SEQ ID NO: 598-620 - skipped (23 entries)

SEQ ID NO: 621 - DNA, 4419 bp, synthetic construct
  source 1..4419: mol_type = other DNA
atggccccaaagaagaagcggaaagtcatgaagcggatcctgggcctggacctgggcaccacctccatcgggtgggccctggtgaacgaggccgagcacgagtccgagcagtccagcatcatcaagctgggcgtgcgggtgaaccccctgaccgtggacgagtcctccaacttcgagaaggggaaggccgtggagactaaccaggtgcgccgcctgaagcggggcgcccaccgcaacctgctgcggtacaagcagcggcgggcgaccctgctgtccatcctgcggaagaacgggttcatcacggaccagaccctgctgtccgagaacggggccaactccacctacgagacttacaacctgcgggccaaggccgtggtggacaagatctccctggaggagttcgcccgggtgctgctgatgatcaacaagaagcggggctacaagagctcccgcaaggccaagtccggcgaggacggcaagctgatcgacggcatgaccatcgccaagcgcctgtacgacgagaacatcacccccgggcagctgtgcttccagatcctgtccgaggggaagaaggtgctgcccgacttctaccgcagcgacctgcagcaggagttcgaccgcatctgggactaccaggcccagttctaccccgaggtgctgaccttcgagctgaaggagcgcctcgtggggaagaacgcctcccagacctgggacaccctggcccagtacttcgtgtggaccgagcagcgcaaggtctggaacgagacactggcccagaacgaggtgaaggacgtggtgttccagctgaccaagcccaaccgcaaggtgaagggcgtggagctgaagaaggagaactacgagtggcgccacaaggccctgtccgagaagatgcaccccgagaacctggccatcgtgttccaggagatcaacgccgacatcaacaagtccagcggctacctgggcgccatctccgaccggtccaagaacctgttcttcaacaacatcaccgtggggcagtacctgatgtcccgcctgaacgagaaccggcacaacagcctgaagaacctggtgttctaccggcaggactacatggacgagttcgagacaatctgggagtcccaggcccgcttccactcccagctgacccccgagctgaaggccgagatccgggacgtggtgatcttctaccagcggcggctgaagtcccagaagtccctgatctccatgtgcgagttcgagcggcaggagaaggaggtggtctgcaacggcaagaccaagaccatcgtggtgggcagccgggtggtgcccaggtccagcctgctgttccaggacttcaagatctggcagaccctgaacaacgtggaggtgatcgtggtggacgacttcggcaagaagaagcgggccaagaagaacatcatcagcccctccaacgccacggaggccaccgagactctggagctggaggggcggcgccgcctgacccaggaggagaaggagatgctggccgaggagctgtccatcaaggccgagctgaagaagtcccaggtgctgaacctgctgttcggcaagaccgagagcctggacctgaacttcgagtgcctgaagggcaacaccaccgggcactccctgtaccaggccttctccaagatgatggacctcagcggccacgagcccctggacttcaagaagtccaccagcgacctgaagtcccagacctacgccgtgttcaagaccctggggtggaactgcaacatcctggacacccagatctacctggacaaggccctggacgagcagaccagctacaagctgtggcacctgctgtacagcttcgagggggacaactccgccaccggggactccaagctgaaggagaagctgaccaccctgtgcaactgccccgccgactacgtggggcccctgatggacatcgtgttcgaggacgactacgggtccctgtccgccaaggccatccgcaagatcctgccctacatgaaggagggctgcggctacgacgtggcctgcacctacgccgggtaccggcacagcgcctcctccctgaccaaggaggagatcgagcagaaggagctgctcgaccagctggagctgctgcccaagaacgccctccggaaccccgtggtggagaagatcctgaaccagatggtgaacgtggtgaacgagatcatcaacacctacgggcggcccgacgagatccgcgtggagctggcccgcgagctgaagaagaaccagaaggagcgggagcagatgaccaaggccatcagcgtggccaccaagcagcaggagcagatccgcgagctgctgcagaaggagttcgggatcagcaaccccagccgcaacgacatcatccgctaccggctctacgaggagctgaaggccaacgggtacaagaccctgtactccgacatctacatcccccgggagaagctgttctccaaggagatcgacatcgagcacatcatccccaaggcccggctgttcgatgacagcttctccaacaagaccctggagtacaggtccgtgaacatcaacaagggcagccagaccgcctacgacttcgtgcgggagacatacggcgaggagggcctgaagcggtacctgtccgcctgcacctccctgttcgcccagcagaaaaccaagctgaagaagctgaagatgaccgaggcggagatccccgccgacttcatcgacagggacctgcggaacacccagtacatcgccaagcgggccctgtccatgctgcacaccatctgccggagcgtggtggccacctccggcagcatcaccgagcagctgcggaaggactgggagctgatcgacgtgatgaaggagctgaactgggacaagtacgccgccatcggcaaggtgtcctaccaccaggaccgcgacggccggcagatcggccggatcaccgactggaccaagcggaacgaccaccggcaccacgccatggacgccctgaccgtggcgttcaccaagccggccttcgtgcagtacttcaacaacaagaacgccgcccaccaggagggcagcgagctgtacgccatccggaacagctacttccagaacgggcgggccaaggcccccatcccgctgcacgccttccgcgccgaggccctgcggcacctggagcagatcctggtgtccatcaaggccaagaacaaggtggtgaccctgaacgtgaacaaggtgcacaagcccaagggcggcacctacaccaaggtgcagctgacccccagggggcagctgcacaacgagacaatctacggcagccggcgggagtacgccaccaaggaggaaaccgtgggctccgccttcgacatggagaagatcgccaccgtgtgcaaggccatctaccgggaggccctgctctggcgcctgaacgagttcgggggcgaccccaagaaggccttcacgggcaagaacgccctggacaagaacccgatctggctgaacgaggcccacaccaaggccgtgcccagcaaggtcaagaccgtgtccttcgacaccacctacaccatccggaaggacatctcccccgacctgaacgtggccaaggtggtggacgccaagatccgcaagctcctggaggcccggctggaggccttcgggggcgaccccaagaaggccttcaccaacctcgaggagaaccccatctggctgaaccaggcccagggcatctgcatcaagcgggtgaccatctacggggtgtccaacgcccagtccctgcacgacaagcgggacaaggaggggcgcctcgtgctggacgagcaggggaaaaccatccccgtggacttcgtgaacaccagcaacaaccaccacgtggccatctaccagaagcccgtgctggacaagaaggggaaccccatcctggacgagaatggggagccccggatggagctggacgagcgggtggtgtccttctacgaggccgtggcccgggtgaaccaggggctgcccgccgtggaccgcgagtacaagcgggacgaggggtggaagttcctgtacacgatgaagcagaacgagtacttcgtgttccccaacgaaaccaccgggttcgacccccgggaggtggacctcctggaccccaacaactacgccctgatcagccccaacctgttcagggtgcagacgatgagcaaggtgatgtacgggaactccaccgtgcgggactacaagttccggcaccacctggagacaaccgtgtgcgacatgaaggagctgcgggacctgacctacaagcagtacaagtccctgcagttcctgcgcaacatcatcaaggtgcggatcaaccacatcggggagatcgtgagcgtgggcgagtacaagcggcccgccgccaccaagaaggccggccaggccaagaagaagaaggactacaaggacgacgacgacaagtga

SEQ ID NO: 622 - DNA, 3768 bp, synthetic construct
  source 1..3768: mol_type = other DNA
atggccccaaagaagaagcggaaagtcatgaagaaggtgctgggcctggacctgggcgtggggtccatcggctggtgcctgatcgagaaggacgagaacaacatccccgtgcgcatcctgcgcatggggagccggatcgtccccatcgactccgacgaggagtccgggttcaccaagggcaacggcaagtccaagaactccgaccgcaccgccaagcggaccgcccggaagtgctacgaccggtaccagctgcggcgccacgccctgatcaacaccctgaagcgcctgggcatcgagcccaacaacatccccgagcagacgcccctggagctgtggcagaagcgggccgacgccgcctccaaggagatctccctggaggagctcggccgggtgctgctgcacatcaaccagaagcgggggtacaagcactcccgcctgtccaacagcaaccgggaggagacagtgtacgtgcaggaggtgaactcccggtacgacaacctgaaggccgagggcctgaccatcggccagcacttcgccctgaagctgaaggagaacgagcagacctccgaggacgggaagaagtactacacctaccgcatcaaggagcaggtgtacccccgccacgcctacgaggaggagacaaagaagatcctcgaggtgcagaagtccttccacagcgacatcctgaccaccgacgtgtgcaaggagatcctgaacatcatcttctaccagcgggacctgaagtcctgcaaggacctggtgagcttctgcgagttcgagagctacaccatcaagaaggacgggaaggagatcaccatcgggcccaaggtggcccccaagaccagccccctggcccagctgtgctccatcctggagacagccaacaacatcaccatccgcaaccggcggaacgacgagctgtacatcctgccggagcagcggaaggccctggccgacttcctggacaacaacgaggtgctgaagctgaccaacctgtacagcatcctcaacatcaacaagaaggacggctggtgggccgggaaggccatcggcaaggggctgaaggggaacaccaccaagtgcgagatccgcaaggccctgtgcaacctgcccaccgaccagatcgaggccctgaccaagttcgagctgaagatcgacgagtacgtggacaaggagacaggggaggtgcggaagcgcatcgacaacacctacgccgagcggcagcccctgtaccggctgtggcacctgatctacagcatcaaggacgccgacgagctgtccgacgccctgcaccacctgggcatcgaggacaaggagacaatccagaagctgtgcaacctggacttccggaccgccggctacgccaacaagagcgccaaggccatcggccggatcctgccctacctgatggagggcatgatgtacagccaggcctgcgagcgggccgggctggaccacagccagcgcatcgaccccgagcgcaccctgctgtccagcctgccgcagatcaagaagaacgagctgcggcagcccgtggtggagaagatcctgcagcagctggtgaacatcgtgaacctgctgctgaaggaggaggggcagatcgacgagatccgggtggagctcgcccgggagctgaagcagtccaaggacgagcgcaacgaaaccttccgccggaacaaccagaacgagcggaagaacaaggagtacgccgagcgcatcaaggagtacgggctgacccccacccggaaccgcatcatgaagatgaagatgtgggtggagtccgagcactcctgcatgtactgcgggcagcccgtggacgtgaaggagttcctgcagggcgccgacgtggagcgggagcacatcatccccaaggggctgctgttcgacaactccttcaccaaccaggtgtgcgcctgccggtcctgcaacagcaagaagggcatgcgcaccgcctacgacttcatcgagtccgagcgcggcgaggaggggctgcgcagcttcatcgagcacatcaactacctgttcgacaagaagcagatcagccgctccaagctgaaccggctcctggtgagctacaaggcctaccaggagcggaaggcccaggggaaggagacagaggaggacaagaacctctgggagaacttcatcgaccgccagctgcggcagtcccagtacatcgcccggaaggccgtggagatcctgcagctggtgtgtcggaacgtgtactccaccagcgggatgatcaccgacctggtgcggcagcagtgggggtacaacgacatcctgcacgacctgaacttcgagcgctacaagaaggccgggctgaccacgatggtcaccaagctgcacagcggcaaggaggtggaggtggagcggatcaaggactggaccaagcgcctggacaaccggcaccacgccgtggacgccctggccatcgcctgcaccacccagtccctgatccagcgcctgaacaccctgaacgcctcccgggacgagatgctgatcgacctgatcaacaaggacgagcgcatcatcgaccccgagcgctccatgctcgagaagtggatctgcgcccagccccacatcacctacgcccaggccaaggaggagatcgacaagatcatcatctcccagcgccccaacacccggatcaccgtgcccgggaagcgctacatctacaagaacgggaagcgcaccctggcccagcggggcatcatcgtgccccgcggggccctgcacgccgagttcgtgtacgggcgcatcctgaagcaggagaacacccaggagggcatcaagctgagcccccagtacgtgcgcaagtacaagctggggatcggcgcccagggcttcctgttcaacgggaaggagttctacaaggaggagctgaagaaggaccccaagaccgggatcgtgaccatcgtggtgatcgacaagatcaaggacgtgctggacaagatcgtggacggcggcatccgccgccggatcctggagcgcctgaaccgggggttcgaggagggcaaggactaccgcaccaacgtgccccaggccctggccaacctgaagaacctggacgaggagcccatctacagcgacgacgccaagacccggcccatcctgtccgtgcggaagtacgtgcccagcaccacgatggtggccgtgcgccgggacgggaacggccggcccctggcgtacgccgagcccgacggcaaccaccacgtggccttctaccgcaacgaggacggcctgatcaccgagcagatcgtgaccaagtggcaggccgtgcagcggaagctgcacgacatccccatcatcatcgacaaccccacccagctgtggaacgacatcctggagcggaacgacatccccgacgagctgctccagaccctgcccaacgacaagagctccctgatgctgtccctgcagatcggggaggctctggtgatggggatggacgaaaccgacttcaagaaggccatcgaggagaaggacatgcggaccctggccgaccacctgtacttcgtgcagaacctgtccagcagcaactaccggctgcggcggcacgtggagtcctcctacgacatcaccgggatgaacaaggaggaccagcggttcctgaacatcaagtccatcggcgccctgatcaactacaacccccacaaggtgaagatcaccgtgctgggggacatcatccccaagcggcccgccgccaccaagaaggccggccaggccaagaagaagaaggactacaaggacgacgacgacaagtga

SEQ ID NO: 623 - DNA, 3750 bp, synthetic construct
  source 1..3750: mol_type = other DNA
atggccccaaagaagaagcggaaagtcatgaagaagcgcatcctgggcctggacaccggcaccaacagcctggggtgggccgtggtggaccgggaggagaacggccagtacaccctggtggacaagggcgtggtgatcttccaggagggcgtgaagatcgagaagggcatcgagtcctcccgggccgccgagcggaccggccaccgggccctgcgccggcagtacttccggcgcaggctgcgcaagatcaaggtgctcaagaccctggtcaagtacaacctgtgccccgccctgaccgaggacgacctggagctgtggaagctccggaagatctaccccaagaaggacgagttcatggcctggcagcggaccaacgacaacgaggacatcaacccctaccactgccggtacatctgcctgaacgaggtgctggacctggaccggcagcaggaccgctacaccctggggcgggccttctaccacatggcccagcgccggggcttcctgtccaaccggctggaccagaccgacgagaaggagacagggaaggtgaaggccgacatcaagaccctgtccaaggagatcgaggacagcgggtgcaagtacctgggcgagtacttctacatcctgtacaaggagaagggcaacaccgtgcgcatccggacccggtacaccgaccgggagcagcactacaagaaggagttcttcgccatctgcgagaagcagaagctgcccaaggagatggtggaggaggtggcccgggccctgttcttccagcggcccctgaagtcccagcgccagagcgtggggaagtgcaccttcgagaagggcaagcccaggtgcagcgacagccaccccctgtacgaggagtacaggatgctgtccttcctgaactccatccggatccagggcccctgggacgtgaacggctaccggcccctgaacgacgaggagctgaagcggatcgagtccctgttctaccgcaagagcaagcccaacttcgacttcgaggagatcgccaagaagatcgccgggaagaaccagtaccagtggaaggacgacaccaaggtgaacatgccctacaagttcaacttccgcatgtcccagggcgtgcccggctgccccaccatcgcccagctgaaggaggtgttcggcgaggagtggaaggagggcatcgccgagacatacaccctgagcaccaagaaggacggcacccagaagtccatcgacgagctggtgaacgacatctggaacgtgctgttctccttcgactccaaggacaaggtgaaggagttcggggtgaagcacctgcagctggacgaggagcaggccaagaagttcagcgagatccggctgtcccgggggtacgcctccctgtccctgaaggccatccggaacatcctgcccttcctgcagatggggatgatctacagcgacgccgtgttcttcgccaagatccccacgatcatcggccagagcctgtgggccgagcggcagaacgtgatcaaggaggatctggcctacgccatccagatggccatgaaggagaagcggcggatcgacgaggccgtcaaggactacctgctggacaacttcgacctgaagcccggggccaccgagctgctgtaccaccccagcatgatcgaaacctaccccgacgccaagcccaacaaggacggcatcgtcctgctgggcagcccccggaccaacgccgtgaagaaccccatggccatgcgcagcctgcacgaggtgcgcaaggtggtgaacagcctgatcaaggagggcaagatcgggcccgacaccgaggtgcacatcgagtacgcccgggagctgaacaacgccaacatgcgcaccgccatcaacgactggcagaaggagcaggagcgcaaccacaaccagtacgccgaggagatctccaagctgtacaaggaggccaccgggaaggacatccagcccaccgacctggacatcctgaagtaccagctgtgggaggagcaggggcacatctgcctgtacaccggcaagaagatcggcatcgccgacttcatcggcgccgggcccatgttcgacatcgagcacaccatcccccagagcgtgggcggcgactccacccaggagaacatgaccctgtgctcctcccactacaaccgctacgtgaagaaggccaagctgcccaccgagctggccgagtacgagagcatcatgacccggatcgagccctggaaggagcacttcgaggagctgagcaagcagatcgaccacatctccacccggggcatctgggacaaggccaccaaggacgccaagatccgcaagaagaaccggctgctgctggagaagaagtactggcagggcaagtacaaccggttcaagatgaccgaggtgccggagggcttcgccctccggcagggcgccgggatcgggatcatcagcaagtacgccgccctgtacctgaagtcctacttccacgacagcctgcaccccgagcggcggcaggtgtacagcatcaagggcgccctgaccaaggagttccgcacgatgtggggcatccagctggagcacgagaagaagtcccgggacaaccacacccaccactgcatcgacgccatcgtggtggcgtgcatcgggaagaacgagatctccaagatgggggagttcttccacaccgaggagcgctacaagatgggggagggccagcggccccctcagttcgagaagccctggcccaccttcacccaggacctgaagcagatcaccgaggagctgctggtggtgcacgacacccccgacaacatgcccaagcgggcctcccggaagatcgagatctccgggggccggcgggtcgtggccaagggggactgcgcccgcggctccctgcaccaggacacctactacggggccatcgagcgcgacggcgagatcaagtacgtcgtgcggaagcccctgtccagcttcaccaacatcaaggacctggacaacatcgtggacgacgccgtccgccagaccgtgctgaacgccgtggagggcaaggacttcaagaaggccatcgccgagcccatctacatgaacgaggccaagggcatcctgatcaagaaggtgcggtgctacacccccaccgtgacccagcccctggacatccggcgccagcgggacgtgtcccgcaaggagtacaagcagcagttccacgtcatgaacgacgagaactacatgatggccatctaccagggcatcgtgaaggggaagcgcaagaccaagttcgccctggtgaacgccatggacgccgccaagttctacaagcggtccaccgaccgcaacgactaccccagcctggtgcccgaggacaaggacgggctgcccctgaagtggtgcgtgcggaaggggacccagctgatcatgctggaggaggacgaggagtccgtgtccctggccaacgaggaggagatgtccaaccgcatgttcaccatcaccaagatggacaaggtcggccggctgacctgccggaactccaaggaggcccggaccgccggcgacctgaagtccttcgtgaacgccaaccccttcaagctgaaggacgggtaccggcccatcctgtgcatgtcccccatcaacttccacttcctggtggaggggtacgacttcaccatcagccccctgggggagatcaagctgaagcacaagcggcccgccgccaccaagaaggccggccaggccaagaagaagaaggactacaaggacgacgacgacaagtga

SEQ ID NO: 624 - DNA, 3723 bp, synthetic construct
  source 1..3723: mol_type = other DNA
atggccccaaagaagaagcggaaagtcatgaacaagaagcggatcctgggcctggacaccgggaccaactccctgggctgggccatcgtcgaccaggacgagtccggccagtacaccctgatcgacaagggcgtggtgatcttccaggagggggtgaagatcgaggggcccaaggagttctccaaggccgccgagcgcacccagcaccgcgccctgcggcggcagtacttccgccgcaggctgcggaagatcaaggtgctggaggccctggtgaagtacaacctgtgccccgccctgaccgaggaggacctgtccctgtggaagctgcggaagatctaccccaagaaggacgagttcatgcagtggcagcggaccaacgacaacgaggacgtgaacccctaccactaccggtacatctgcctgaacgaggtgctgaacctcgaccggcagcaggaccggtacaccctggggcgggccttctaccacatggcccagcgccggggcttcctgtccaaccgcctggacgtgaaggaggaggacgagtccggggccgtgaagtccgggatcgccaacctgtccaaggagatcgaggagtccggctgcaagtacctgggggagtacttctacaagctctacaaggagaagggcaacaccatccggatccgcacccggtacaccgaccgggagcagcactacaagaaggagttcttcgccatctgcgacaagcagcacctgcccgaggagatgatcgccgagctggcccgggccctgttcttccagcggcccctcaagagccagcggcagaacgtggggaactgcaccttcgagaaggggaagccccgctgctccgacagccaccccctgtacgaggagttccggatgctgtccttcctgaacaacatccagatccagggcccctgggacgaggtgtaccgccccctgaacgaggaggagcggcagaagatcgactccctgttctaccgcaagtccaagcccaacttcgacttcgaggagatcgccaagaagatcgccgggaaggggaagtaccagtggaagggggacacccagaccgacctgccctacaagttcaacttccggatgagccagggcgtgtccgggtgccccaccatcgcccagctgaaggaggtgttcggcgacgactggaagaaggggatcgccgaaacctacatgctgggcaccaagaaggacggcatgcagaagtccatcgacgagatggtgaacgacatctggaacgtgctgttctccttcgactccaaggagaaggtgaaggagttcggcatcaagaacctgcagctgaacgaggagcaggccgagaagttcagcaagatccggctgagccggaactacgcctccctgagccagaaggccatccggaacatcctgcccttcctgcggatgggcatgatctactccgacgccgtgttcttcgccaaggtgcccgccatcatcgggcagaacctgtgggaggcccggcagagcgagatcatggaggacctctcctacaccatccagatggccatcaaggagaagcggcacatcgacgaggccgtgaaggactacctgcaggacaacttcgacctgaagcccggcgccgccgggctgctgtaccacccctccatgatcgagacataccccgacgccaagcccaacaaggacggggtggtgctgctgggcagcccccgcaccaacgccgtgaagaaccccatggccatgcggagcctgcacgaggtgcggaaggtgatcaacaacctgatcaaggaggggaagatcgggcccgacaccgaggtgcacatcgagtacgcccgggccctgaacaacgccaacatgcgggccgccatcaacgagctgcagcgggagcaggaccgcaagcacaagcagtacgccgaggagatccggcagctgtacaaggaggccaccgggaaggacatccagcccaccgaaaccgacatcctgaagtaccagctgtgggaggagcagggccacatctgcctgtacaccggggacaagatcggcatcgccgacttcatcggcgccagccccacctacgacatcgagcacaccatcccccggtccgcgggcggggacagcacccagatgaacatgaccctgtgctcctcccggtacaaccgggaggtcaaaaagaccaagctgcccaccgagctggccgagcacgagttcatcatgacccggatcgagccctggaagcagcggatcgaggagctgcggaagcagatcgaccgcgacaagaagggcaacgagtccgacaaggcggcccgcgacaagcggatccgccggaagaacctccacatggaggagctgaagtactgggagggcaagtacgaccggttcacgatgaccgaggtgcccgagggcttcgcccgccggcagggcgccggcatcgggctgatctccaagtacgccgccctgtacctcaagagctacttccacgacaccctgcaccccgaccggcggcaggtgttctccatcaaggggaccgtgaccagcgagttccggaagatgtgggggatccaggacgagtacgagaagaagtcccgggactcccacacccaccactgcatcgacgccatcgtgatcgcctgcatcggcaagaacgagttcaacatgatggggaagtaccaccacgacatgtacgactacaacgagggcaacgggcccaagccccagttcgacaagccctggcccaccttcacccaggacctgaagcagatcaccgaggagctgctggtggtgcacgacaccagcgacaacatgcccaagaaggcctcccggatgatcgaggtcaacgggaagaaggtggtggccaagggcgactgcgcccggggctccctgcaccaggacacctactacggcgccatcgagaaggacggcgagatcaagtacgtggtgcggaagtcgctgtccaccctgaaggagagcgacgtggagaacatcgtggacgacgtggtgaaggagaaggtgaagcaggccatcgccgagaagggcttcaaggacgccatggccggcgacatctacatgaacgaggccaagggcatcctgatcaagaaggtgcgctgcaagaccggggtgacccagcccctgcagatccgcgagaagaagcggcgggacctgtcccgcaaggagtacaagcgccccttctacgtcgtgaacgacgagaactacatgatggccatctacgagggcggcaagatgcagatggtgaccgccctcgacgccgccaagttctacaagcggtccgccgaccgcaacgactaccccaccatcgcccccatggagtacaaggggcggaagctgaagtacctggtgcggaagggcacccagatcctgatgctggagaagaacgaggagagcatctccaccaccaacccccaggagctgttcaagcggctgttcaccattatggtgctggagaaggacgggcggctgatgctgcggcacagcagcgaggcccgccccgccaccgaggtgaagaagctgctcacctacaaccccttcatgctgaacgacgacacccgccccatcctgcgggtgtccctgagcaagctgaacttcctggtggagggctacgacttcaccatcacgcccctgggggagatcaagctgatccacaagcggcccgccgccaccaagaaggccggccaggccaagaagaagaaggactacaaggacgacgacgacaagtga

SEQ ID NO: 625 - DNA, 3888 bp, synthetic construct
  source 1..3888: mol_type = other DNA
atggccccaaagaagaagcggaaagtcatgaccaagaacctgaagtactacctgggcctggacctgggcatcagctccgtgggctgggccgtcatggccgaggacgtgaccaccggcaagcacaccctgcacgacttcggggtgcgcctgttcgacgtggccgaggagagcaagaccaagacctccctggccaccaagcgccgggagttccggagcacccggcgcctgatccggcggcgcttccaccggctggagatgctgaagcgccacctgaaccagatcaacctgttcgacaagcaggccttcatcgacaacttccagacccagttcaaggtgaccaacaagatcgtgttccagaacaaccagtggaccaccgagagcgggtacttcaacccctacgtgctgaaggccaaggggctggactacaagctgtccaaggacgagctgtacgtggtgctgatcaactacgccaagaagcggggctacgccgacaagttctccctggagaacgacgagaaccagtccaaggacgacaagaccaccaaggccaagaccaccaagctgaccgacagcgccaacaaggccagcgagctgatcaagaagtaccagtccatcgccaaggccgtgatccaggacagccagttccacctgagcgccagcaagaccacccggatcctgttcaccaagaacagcagcaagctggtgtacaagaagtccaagagcgaccagtacaagaagtacatcgacgtgaacagcgtgatcgacaagaagcagcgggacgagctgtccaagcggatcaacttccggcacctgttcgacaggcaggactaccagaacgaggccaagaccatcctgtcgaagcagaagcagtactaccccaaggagctgaccaacgagaactgcgagaagatcatcaagatcatcttccagtctcgggacttcgagatgggggccaagtgcaacgactgcaccaaggtgatgatcgacagccccgacagctaccagaaccagctgcacaagtgcaagaacaagcactgcagcaacttcgggatcttctgggacatgaccgggaagtgccacttctaccccaccgagaaccgggggaccaaggccagcatcctgttcaccgtgttctactacgtgaacgagctgagcaagatctggaacatcctggccaaccacaagctgatcctgacccccaccgagaagcagtccgtgctgcagcagatgctgaccagcgactggaaggaccggcgggccgccatcaagctgatccagatcgccatccaggccagcgccgcctggaagatccacggcaacaaggacctgctggactccaagaagatcaagatctggcagagcgagaagtccagcgggctggagctgaagcggccctccttcttcaagacctgctgggaaaccagcaccctgaagcccttcctgaccaagatcaccatcaacgagaagaacatcgaccagtgggagaagaacctgatctcccagatcgggtccttcaccagccggtggatcacgccccaccggcggaagaaggccatcgagaacctgctgaacaagttccagatcaagttcgacgccaagacgatgaaccagttcctgagccccaagctggtcacgtcccccgccaacgtgagcttccagttcatgaaggaggccatccaggcctacctgaagggcatcaacttcgccgacttccaggccgagaaggtgaagcagcaggacgaggtcatccagacccggttcaagaagaacagcaacagcaagaagctgttcgccaagttcaccgacctggagatgacctccaaccccgtggtgttccgggccatcaaccagacccggctgatcctgaaggccctgcacaagaagtacacccagttcgagaacatcgcggtggaggtgggccgggacatctacaagtccgccaaggaccgcaacaagatcgagcaggcccaggacaagaacctgaagaagaagatcgccatcatccagaagctggccgagaacaacatcccccagaaccaaaagaccatcctggcctacctgctgtgggagcagcagaacaagcagtgcatctacagcggcaagaccatcgacctgaaggacatcaaccccgtggacaagatggtggagatcgaccacatcatcccccggtcctggagcgccgacgactccaggaacaacaaggtgctggtgctgaccgaggagaaccagcagaaggggcagcagatcccctaccagtacctgaagaacaactggaaaaccttcacgatgcggatccacaagctggagaactacctgggcaagaccaagaccaactacctgctggccaagaccgtcgaggaggccgtcgagggcttcgccagcaggaacctgaacgacacccggtacatctccaagtacatccacaactacctgctgtccgagttcaagaaccaccagatcaagaccaacgtgttcgccgtggtgggccaggtgatcagccggctgcggcggaagtggctggccagctccgcctgggggctggaccagaaggtgcgggacatcagccccttccaccacgccatcgacgccagcatcctgtgccagttcaagaagaagatggacatcgagctggccgtcgacctgatcaagctgaaggacctcaagaccgccatcgaccggttcgagagcgagggcaaccccaccaagctgaccaacgccctcgccaacaagaacgccttcatggagtccatcaagaacaagatcaagaccctcaagaccgcctccaagaacgaccagaagaagcggttctacaacgtgaacgagtacatggagcggatctacctggccgaccgcaagaaccagttcgtgaacaacctgtacatcgacgatttccagaaccagctggagaagcggatccccgtggagctggagatcctcgactgcaagtgcttcgacaccgagacaaagaagatcctgaacctggcctgccagaactgcaacggcagccggaagctgcccaagtacgtgaacgtgctgaacgaggaggagtggaagatcgccaccaaggacctggacaccaccaacatcgacctgcactacccccacatcagccggatggtgcggtacaaggtgcgggggcagatctcctcctccgagaacctggggttcgtgctgaacggcctgcccaaccccaagaaaaccatcctggagaagtccaagaacaagctgttccggctgtggctgcggaacaacaagatcacctacaccgacgccaagaaccagatcaacaacatctacttcagcaacgactacttcaacaactggatcatcgagttctgcaactggaaggaccccaagaacaagtccaagcccttcatcaccagcgggaacgtggacggcaaggtgggcaacatcatcgagatcaagcggttctacgggctcaagacgcccctgcagaagctggactccagcaaccagcagaagaaccagtacgagtggatcagcatctacgacgccaagaagaacaagaacctgttccaggactactccaagatcctgctgcacaacaagctgatcaagtactacgacaacaagatctacaacaagaacctgaagaagaacgggaagtacatcgtgaagtgcttcttcagccggaaggacgagaagaaggcctacctgtccgtgaacagcctgaccaagtccaccgacaagacccagaagatcttcaacttcaacaacagcgtggacagcgtgtccaacctgttcaagaacaagtggtccctgatcgaggtggacctgctgggcaaggtcatcaagcggcccgccgccaccaagaaggccggccaggccaagaagaagaaggactacaaggacgacgacgacaagtaa

SEQ ID NO: 626 - DNA, 3297 bp, synthetic construct
  source 1..3297: mol_type = other DNA
atggccccaaagaagaagcggaaagtcatggacaccccctacctgctggccctggacctggggaccagcagcatcgggtacgtcgccttcgccctggacgacagcgacgagcccaagtccatcctggacctgggggtgcggatcttccccgacggccggcaccccaagaccaaggagcccctggccgtgtcccggcggatcgcccggggcatccgccggaaccgggaccgggggcagaaccgggtgcggcggctggtgaaggagctgatcgagttcggcctgttccccgtggacgagcgggagcggaagaaggtgttcgacaccgtgagcccctactacgcccgggccgccgccgcccaggagctggtggacaaggaaaccctgggccgggccatcttccacatcggccggcgccggggcttcaagtccaaccggctggccggcgagtcggaggagtccgagttcaaggagaagatctccgagctgcggaacaagctggagggcaagaccctgggcgagtacctgttcgagcgggagaagcagaaccaggccctggccaaggacaagaaggcccacgaccagaagcccttccgcttccgcaacggcgagacagacttctacgccgaccgccagatgtacctggacgagttcgagcggatcaaggccgtgcaggggaacatccacctgaacgacgagcagtgggccgccctgaaggagactgccttctggcagtaccccctgaagcccgtgcccaagggcaagtgccggtactaccccgaggagaaccgggcccacatcgacctgcccatcagccacgactaccgcatctaccaggaggtgaactccctgcggtaccagtcccagaacatcgagtacagcctggacgaccggcagcgcaaggccgtgtacgactacctgcgcagccacaagacgatgaccttcaagcagatgctgaagctgaaggagcagaagtccccgctgttccccagcgacgcccagttcaacctggacgtcgccagccggaacggcaagctgatgggcaacaagaccctggtcgacttcatgaagaaggagctgctcggggccatcgccgagaagatcgactacgtggccctgaacggcatcgccgacctgctgatcgagcccctggaggagatcaacggcaagaaggtggtgatggaaaccgagaaggtggccctggagctgaagaagcggatccccaacctgtccgacgagcagatcgagaacctgtgcaactacaggttcaagcgggacaccgccggggtgtcccgcaagttcatggagcagatcaaccccgtgatgcgggaccagggcctggtgtacagcgacgccgtggcccagctcaaggacgacaacgggcaccccttcaaccacacctacggcaacaccggcgaggtgctccagcggctgccctactacggcgaggtgatgcccgagtccgtgtggggcgcccagcccgaggcggacaagaacaagagccccctggagcgggacgacgacgcctaccagtacggcaagatcgccaaccccaccgtgcacgtggccctgaaccagctgcgcgtggtggtgaaccgggtgatcgacaagctgggctccgtgcccgccaagatccacgccgagctcacccgggacctgaagaacagcaaggacgcccgggagcagatcgagaagcagcagcggaagaacaagatcaagaacgacgagatccggcgcttcctggtggacgagctggggatcatcaaccccagccgccgcgacttccagaaggtgaagctctgggaggagctgggcaagcagggggcccggttctccgtgttctccgggcagtgcatctccgcctcccagctgttcaacggggaggtggagatcgagcacatcgtgcccttctcccgctgctacgacgacggcatggccaacaagaccctggccttcaagaacgagaacaaccagaaggggaacctgaccccgcacgaggccttcgccggggccgggtcccagtacagctacgacgacatgctgaagcgggccctgagcgtgttcgggcagacctccaagtacgagcggttcaaggaggacgcctacgagcggttctacgggggcgagaagggcgacatgatcgcccggcagctgaacgacaccaagtacatcagccggaaggcccaccagtacctgagctgcctgtgcacccagcacaacgtggtgtccgtgaacggcatgatgaccgccgtgctgcgggacgtgtggcagctcaacaacttcaaggaccgggccaccggccactaccgcgaggaccaccgccaccacatcgtggacgccttcgtggtggggctgacctcccggtccctgatcaaccgcctgaacaccaggcggagcaccgtggaccagacccagaaggacctgtaccacttcctgaagtccagggtgaacgacatccccgagctcaagaaggagctgttcaagaagctggacctggtggtggccagctacaagccggaccgcacccagaccgggtccatgttcaacgacaccgcctacgggatcaagtccaccgaggacgacaccaagtacgtgacccggaaggccatcaccgccctgaccgagaaggaggtgctggccatccgggacagcgagatccggcagaacctgatcaagcacctgaccgggcggctgaccgtggagaacctccgcgagttcaaggtgtccctgggccccgggaaggacttcatcgacaagaaggcctccttcgccaagaaaaccggcatcaacaaggtgcggatcaacgtgcccaacacctccatcgaggcgatcaagtccgcctcctacaaggggtacgggaagaacagctacgccttctgcgacgtgtggatgatcccccacaagaaggacaagaagtccggggagtggctgtaccgcttcgagggggacttcgtggccttcgccgacgcgaagcaccacgaccccgagagcttcaaggtggggcggcaccccgccatgaagaagctggtgcggatctacaagcaggactgcttcacgatgaccaacaagctgaccggcgaggccgagcacatccggatcgccgggtacgacgccagcaagaacaagctggacgtgcgggagaacctgaaggccgtgaacgagaagcagaaccacatctccatcaacaccctgttctccaaccaccagttcaagaagctgcggctgaagcggcccgccgccaccaagaaggccggccaggccaagaagaagaaggactacaaggacgacgacgacaagtaa

SEQ ID NO: 627 - DNA, 3264 bp, synthetic construct
  source 1..3264: mol_type = other DNA
atggccccaaagaagaagcggaaagtcatgctgaagtaccgcatcggcatcgacctgggcaccaacagcctgggctgggccgccatccagctcggcagcgagctggagccccggcagctgctggacctgggcgtgcggatcttcagcgacgcccggaaccccaaggacaagtccagcaacgccgcccagcgccgggagccccggggcgggcggcggaaccgggaccgcaagctgcagcggtcccggaagctgctgcggaacctgatccagtacgggctgctgcccgagcaccagaccgagcggaagatgctcgagtcccaggacccctggtccctgcggaccagggccctggacgagcccctgagcccccaccaggtggggcgggccctgttccacctgaaccagcgccgggggttcaagtccaaccgcaagaccgacggggacaacgacgggaaggtgcacgacgccatcgcccggacccacgacagcctgaacctgcacaacgcccggaccctgggcgagctgttcgggcggccccggctggagcagatgcggaccaacgagtccgcccccaaggggtcccggaagcccctgcccctggcccgggtgcggagccgggggcagggcgccaagatggtgtacgactactacccccagcgggacatgatcctggacgagttcgagcagatctggtccagccaggccaagttcctgcccgacatcctgaccagcgaggcccacgactgcctgcgcgagatcatcgccttccagcgggagctgaagaagcaggatgtgggcaagtgcacctacatcccggagtacccccgggcccccaaggccctgcccagcgtgcagcggaagcgcatcctggaggaggtgaacaacctccgggtggccgccaccggggaggccagccgggtgctgagctccgacgagcggaagatcctggtggacttcctgcggctgcccagctccaagatcgggaagcggaccttcgaccggctgcggaagcagatcaacctgcccccgagccagcgcttcaacctggagagcctgaagcgcaccttcctgcagggcgacgagacagccgcccggctgatgcagaacgacgccttcgggaaggcctggctggacttcgacctgacgatgcaggacgagatcgtcctgcgcctgctggaggaggaggacgaggacgagctgatcggctggctgcagtccgagcacgggctgaaccccgacgtggccatgcggatcagcgggatcagcctgcccgacagctacgggaagctgtccctggaggccatcgagcggctgatcccccggctggaggccggcgagcggaacgacgaggccgccgccgccgagttcggggaccaccgggccctgggcgacggcgagatccacgaggacggcctcccctactacggggagctgctgaaccggcacaccgccttcgagaagtccgaccccaagaacgacgaggagcggttcggccgggtggccaaccccacggtccacgtggccctgaacgagctgcggaaggtcatcaacgacctgatccgccgcttcggcccgcccacccaggtggtgctggagctggcccgggacctgcccctgtccgaccgggggctgaaggacctggagcgccagcagaaggacaaccaggactccaacgacaaccggcggaaggagctggagaagctgggggtgatcaacaactacgacaaccggctgaagctgcggctgtacgaggagctgccccagctcaacaagtgctgcatcttcagcgggaagcccatcagcatcaccgacctcttctccagcgacatcgagatcgagcacatcctgcccatcggggagtccctggacgactccttctccaacaaggtgctcagcacccgggaggccaaccggtacaagaagaagcggagccccttctccgccttcggggcctccatcgacggctacgactgggagcaggtgtcccagcgggccaccgacctgccgcccaacaagcggtggcggttcgcccccgacgccatggaccggttcaccgacgagtccaacttcctggaccggcagctgaacgacacccggtacatcgcccggctgggcaagaccttcgtggagggcctgttcggcgggcagggggcccgcgggcaggagaactccgtgtgggtggtgtccggccggctgacctccgacctgcggcacttcgccggcttcaacggcctgctgtccgacgacaacaagaaggaccgcaccgaccaccggcaccacgccatcgacgccgtggtgatcagcctgaccgaccgcacgatggtgaagcgggccgccgacctggccaagcgcgaggaccaggtggcccactacgagatcatgaaaacgatggccgagccgctgaagcggtaccgcaagtccgtggaggaccggctggccaagatgacggtgtcccacaagcccgaccacgggttccaggacgccatgcacaacgacaccgcctacgggatcaccgggcagcacgacgagaagaaccagagcatcctggtgacccggaaggccctggacagcttcgagaagcggagccagctggacgccatccgggacgaaaccctgcggcggatcttcgtggaggccaccgagggcctgacgaagtccgacttcacccacgccctcatccaggagggccggagccagagcccgcccgtgtacaccgtgcgggtgaccacccccatgaaggacacctccttcgtggtcatcgagcacggcgacggccacaagaaggcctacaagggcgacggcaactactgctacgacatctggaccgacgagcggggccgctgggtgggggaggtgatcaccaccttccaggcctaccagaaggcccggaagaaccccaactggtggcggaaccgcaccgggggcaacggccagcccctggagatgcggatccgcaagggggacatgctggagatcgacgaccccgccgggcggcgcaaggtgatggtgtacaagttctccaaggggaagatctgcatggccgaccacaacgaggccgacgcctccggccggatccgctccggggagctgatgcagacccagatggccccctccagcctgcagaccgtgtccgccgtgcagatctccgtgagcccctccgggcggatccaccgccggaaccacctgaagaagcggcccgccgccaccaagaaggccggccaggccaagaagaagaaggactacaaggacgacgacgacaagtaa

SEQ ID NO: 628 - DNA, 4596 bp, synthetic construct
  source 1..4596: mol_type = other DNA
atggccccaaagaagaagcggaaagtcatgaagcggatcctgggcctggacctgggcaccaactccatcgggtgggccctggtgaacgaggccgagaacgagaacgagaagtccagcatcatcaagctgggcgtgcgggtgaaccccctgaccgtggacgagcagcagaacttcgagaaggggaagtccatcaccaccaacgccgaccgcaccctgaagcggtccatgcggcgcaacctgcagcggtacaagctgcggcgcgccaacctgatcgaggtgctgaaggagaagcagttcatcaccgaggagacaatcctcagcgagaacggcaactacagcaccttcgagacttacaagctgcgggccaagtccgccaccgaggaggtgagcctggagcagttcgcccgcatcctgctgatgatcaacaagaagcggggctacaagagctcccgcaaggccaagtcccaggacgagggccagctgatcgacggcatggagatcgccaagcggctgtacgaggagaacctgacccccgggcagttcgtgtaccagctgctgctggacgggaagaagttcatccccgacttctaccggtccgacctgcagtccgagttcgacaagatcttcgacaagcagctgagcttccacaccgagttcctgagcaccgagctcaaggaggagctgcgggggaagaagcgcgacgccgtgtgggcgatctgcgccaagtccttcaaggagaagggcttcgagctcgtggggatcaagcggcagggcaagacctacgagcagaaggtggagaactacgcctggcgcgccaaggccgtgaacgagaagctggacctggagcagctggtgatcgtgctgcagcagatcagcatccagctgaactccagctccggctacctgggcgccatcagcgaccgctccaaggagctgttcttcaacaagcagaccgtggggcagtacctgatggcccagctgaacgagaaccccaacaccagcctgaccaaccaggtgttctaccgccaggactacctggacgagttcaacagcatctgggagactcaggccaagttccacaaggagctgaccgaggagctcaagaccgagatccgcgacatcatcatcttctaccagcggcggctgaagtcccagaaggggctgatcagcttctgcgagttcgagagccgccagatcgaggtggagatcgagggcaagaagaagatcaagaccgtggggctgaaggtgtgccccaagtccagccccctgttccaggagttcaagatctggcagaagctgaacgacatcgagatcttccccgccaacgagaagaagaagaagtacaagcccaacgccaagcggctgaaccaggagcagaaggagctgctgttcaaggagctgtccggcaaggagaagctgaccaagaaccagatcctgagcctgctggacatgcaggagttcgacatgaacttcaactccatcgacggcaaccgcacccaggccgagctgctgaagaagtacaaggagatcatcgagctcagcgggaagaagatcgagtccaacgagactaccgacaacgagatcaacatcatctccaagaccttcaacgagctgggctacaacaccgacatcctgtacttcaacagcgacgtggagaacctggacgacgagcccttctacatgctgtggcacctgctgtacagcttcgaggacgacaagtccaacaccgggaacgagagcctgatcaacaagctcatgttcgagtacgggttcgaccggtccagcgccagcatcctggcctccgccaccttccaggacgactactccagcctgtccgccaaggccatccgcaagatcctgccccggatgaagcagggggaggactacaccaccgcctgcgcctacgagtacggcaagcactccaagaactccctgaccaagaaggagctggagagcaagctgtacaagaaccacctggagatcatcaccaagaactccctgcggaaccccgtggtggagaagatcctgaaccagatggtgaacgtgatcaacgccatcatcgacgacccccagctggggaagcccgacgagatccggatcgagctggcccgggagctcaagaagtccgccgacgagcggatcctgctgaccgagtccgtgaagggcaacaccgaggacatccagcggatcaagaagcggctgaaggaggacttccccatcttcaagaccaacgagccctcccggaacgacatcatccgctacaagctgtgggaggagctggcccccaacgggcacaagcccctctacggcaacaaggagaacctgaagaaggagatctcccccgccatcctgttcagcaaggagatcgagatcgagcacatcatccccaaggcccggctgttcgacgactccttctccaacaagaccctgatcttctcctccgacaacaaggacaagcgggagcggacggccctggactacgtgtcccaggacttctccgacgacttctccaactacatcaaccgcatcatcaccgtgttcggcaccaagaccaccaagcgggtgaacaagctgaccaagcggatcgagacagacaccaagaccttcgactccatctacaaggagcacgagcggtccctgcggaacaacaagaagcagaaggagaagctggccaagtgggacagcagctccgaggacgagaagaagaagcagaagaagccctgggaccgcatgtccgacaccgagcggaacctggaggtgatcgagaagtactactccgggaagctcggcaagctggccctgtccgagaaggacctgcccgagggcttcatcaaccgggacctggccaacacccagtacatcaccaaggaggccaagaagatgctgggcgacctggtgaagttcgtgaccagcaccaccgggtccatcaccgaccggctgcgggacgactggcagctggtcgacgtgatgaaggagatcaactaccccaagtacgagaagctggggctggtggaggacgaggagcggatcgactacaagaccggggagatccgctacaccaagaagatcaaggactggaccaagcggaacgaccaccgccaccacgccatggacgccctggccgtggccttcaccaagcgccagttcatccagtacctgaacaacctgaacgcccggcggaccaacgaggagcaggggatctccaacaccgagaaggaggagcacgacaacttcgccatcaccgccgaggacgtcgtgctcaacacccgcgacgtgctgggcatcgagaagaactacctgtaccgcgacaagcggaacaagctgcgcttcaacccgcccatgcccctggacgagttccgggccgaggccaagaagcacctggagaacaccctgatctccatcaaggccaagaacaaggtggccaccatcaacatcaacaagaccaacaagtccgggggccagaacaagaagcagcagctgacccccagggggcagctgcacctggagacagtgtacggctccgcccagcagtacgtgaccaagatcgagaaggtgggcgccggcttcaacgaggagcagatcaacaaggtggccaagaaggcctaccgggaggccctgctgaagcggctgatcgagaacgggaacgaccccaagaaggccttcaccgggaagaacagcctggagaagaaccccatctggctggacgagctgcacaccatccaggtgcccgacaaggtcaagaccgtgtccaccgagacaatctacaccatccggaaggagatctcccccgacctgaagctggacaaggtgctggacgccaagatcaagaacatcctggaggcccgcctgaaggagtacaacggcgacaacaagaaggccttcagcaacctggacgagaaccccatctggctgaacaaggagaaggggatctccatcaagcgggtgaccatcaccgggatcaacaacgccgtggccctgcacgacaagaaggacaaggacggcaagtgcatcctggacgacaacggcaacaagcaggccgtggacttcgtgaacaccgggaacaaccaccacgtggccatctaccgggacgagaagggcaacctgcaggagaacgtgatcagcttcttcgaggccaccacccgggtgaacctgggcctgcccatcatcgacaaggagtacaaggagggcgaggggtggcagttcctcttcagcatgaagcagaacgagtacttcatcttccccaaccagcagaccggcttcaaccccaacgagatcgacctgctgaaccccgagaactactccctgatcagccccaacctgtaccgggtgcagaagctgagcaccaagaactacgtgttcaaccaccacctggagacaaccgccgtgaccggcgacaccctgaagaacaagaaggagctcagcaacatcacctaccgcttcatccagagcctgcccccgatccagaacatcgtgaaggtgcggatcaaccacatcgggcagatcgtgtccgtgggggagtacaagcggcccgccgccaccaagaaggccggccaggccaagaagaagaaggactacaaggacgacgacgacaagtaa

SEQ ID NO: 629 - DNA, 3075 bp, synthetic construct
  source 1..3075: mol_type = other DNA
atggccccaaagaagaagcggaaagtcatgaccaagaccaccctggggatcgacctggggaccaactccatcgggtgggccctgctgaacgagaagaaggagcagatcatcgccaccggggtgcggatcttccccgagggggtggaccgcgaccagaagggcggcgagatcagcaagaaccagacccgccgcgagaagcgggggcagcggcggcagaccgcccggcggcggagccgcaagcaccggctgctgaagcagctgatcgaggtcggcctgctgccccagcagcaggacgacttctaccccctgctgaccaacccctacgagctgcggaagcgggggctggacgagcagctgtccctgcaccagttcgggcgggtgctgctgcacctgaaccagcggcgggggttcaagtccaaccgcaagagcgacaagcagaaccagaaggagacttccgacatgctgaaggagatctcccagctggagtccgacatccacgagaacgggtgtcggaccctgggggagtacttctacaagatccagaacaccgacagcaacgacaagaagcagaaccacatccggctgcggtcccaccacacccaccgggagatgtacgagaaggagctggagctgctgtggcaggcccagcagaagttctaccccgaggtgctgatcgacgacctgtacgacgacgtgcggcagacgatgttcttccagcgggacatgtactgggaccccaagaccatcgggctgtgcgagctggagaaccagaagcgctgcccccgggccgaccgcatggcccagcggttccggctgcggcaggagatcaacaacctgcggctgctggacgagtccaccggggaggtgcggtccctgaacgccgaggagcgcgagaaggtgtacgagaagctctccaccacccgcgagcgctccttcgacaagatccgcaccgacctggggttcgacgagcactgcaagttcaacttcgagaacggcaagcggaacaagctgaaggggctggagacagacgccatcctgtccgggaagaagtacctgggcaagaagtggttcgagtacagcgaccagcggaaggacgagatcgtgtactgcatcatcgacgagaagctcggggaccacgacttcctggacaaggcccagaacgagtggggcatggacaaggagacagccgagaacctgctgggcgtgaacctgcccgaccactacatgaacttctcccggaaggccatcgagaagctgctgcccgccctggaggaggggctgcccctcatgaccgacgacaagaaggagtcggccatgagccgggccggctacctgcggcccgaccagcggcccaacaagatcgaggacttcctgcccaagcccccggacctgcccaaccccatcgtgcggcaggccctgttcgagttccggaagctgctgaacgccatcatccgggagtacggcaagcccgacaagatcaacatcgagctggcccgggacgtgaagaaccccaagaaggtgcgggaggagatctcgatcaagatctgggagcggacccagctccgggagactgccaagcaggagatcgagaagctgggcgagaagcccacccgggacaacatcgcccggtacctgctgtgggaggagcaggggcgcatctgcgtgtacagcggcaacaacatctccctggcccagctgatgaagggggagatcgatgtggaccacatcctcccctacagccggtccctggacgactccctgcagaacaaggtggtctgcttccggaaggccaacgccgacaagggggaccagaccccctacgagtggctggccgagatgcaccccacccagtacgaggaggtgcagcagcgcatccggaagctgcccttcggcaagcggcagcggttcacccggaagaacgtggagctggacgacttcgtgaaccgccagctgaccgacatccagtacatcagccgggaggtcatgaagtacgtccgctgcctgggcagcgagatcgtctgcaccaagggccagaacaccagcgacctgcggcacgtgtggggcctgaacaccgtgctgaacaacgagaacctgaacatcaagaaccgcgaggaccaccggcaccacgccgtggacgccatcgtggtggccctgaccgaccggtcccggctgcagcagctggcccggtcccggaagcgcaccaagggccagatcgagttcccccacccctggcccaacttccggaacgaggccgagaagcacatcaacagcatcatcgtgagccaccgggtgcagcggaagatccagggggccctgcacaaggagacaatctacggggccaccaagaagtccggcgagtacgtgtaccgcaagctgatcaccgacagctccttcaccctgaatatggtgaacctgatccgggaccccgtgatcaaggacctggtgatcgagcggctgaagaagttcggctacgagcccggccggggcaagggcaccatcaagaaggaggtgtggaaggagcccctgacgatgctgagcggcaccctgatcaagaaggtgcggctgatcaagaagaacaagaccatccagcccatccggggcgggaacagccacgtgcagcccggcaacacccaccacatctgcctcttcaagaaggagggcaagatctgcaagatgatctccgtgcccatgatcgaggccgcccgccgggtgaaggaccacgagcccatcatccagcgggaccctccgcccgactaccccgactccgtgttcttcatgagcctgagcaacaacgagatcgtgatgctcaagcacaagggggtggaggacatctaccgcttcgacaccagcgcctccacctcccagcagatgcacttcatccaccacacctacgccgtgaaggagaaaacccccgccgtgcggctgagcaagaagcccagcaccctggacgcccggaagatcacggtggacatcctcggccggatccggaacgccaacgacaagcggcccgccgccaccaagaaggccggccaggccaagaagaagaaggactacaaggacgacgacgacaagtaa

SEQ ID NO: 630 - DNA, 3483 bp, synthetic construct
  source 1..3483: mol_type = other DNA
atggccccaaagaagaagcggaaagtcatgacccggaacaacctgagcctggggctggacatcggcatcgccagcgtgggctgggccgtgctggactccgaccacatcatcgccctgggcgtccgggccttcaacaaggccgaggtcgcccagaccggcgagagcctgaacctgcagcgccggtccgcccggctggcccggcgcacgctgcggcaccggcgccagcggctggccaagctggccaagctgctggaggcctccggggtgatcaccaaggagcggctgtacgccacccccacccgggagagctaccccagcccctgggccctgcgggtcaaggggctggacgagtgcctggccggggaggagtggggccgggtgatctaccacatctgcaagcaccggggcttccactgggtcagccgggtggaggagaagaagtccggcgagaacgccaagcaggagggcgggaaggtgaagcaggccctgaagtccacccggggcctgttcgcctccaagaagtaccggtccgccgccgagatgatcatctcggagttccccgacgcctaccgcaacaagcacggggactacggcaaggccctgtcccgcaccctgctgagcgaggagctggagctgctgttccagcgccagagctgcctgaagaacccccacgccacggacttcctgaagaacgccgtgctggggaagggcgacaagaaaaccggcctgctgtgggagcagcaccccgccctgagcggggacgccctgctggccatgctggggaagtgcaccttcgagcgccaggagtaccgggccccgcggaagtccttcaccgccgagcggcacgtgctgctcacccggctgaacaacctgcggatcaccatcgacggggcccggcggcccctcaccgacaacgagcggcgctgcgccctgtccctgagctacgagcgggccgccgacatcaagtactccaagctgcggtccgccctggaaaagacctgcggcacccccagcgagttcgccttcgtggggctggcctacccctccgagttccagaagcaggaggagaaggccaagaaccccgaggaggccgccgtgttcaagctcccaggctggcacgagctgcggaccaccctgaagaaggccgggctggaggacgagtggaagcagctgacctgcctggccctgaagggggaccccaccctgctcgaccaggtggcctgggtgctgtccgtgtacaaggaggacgaggaggtggtcgccgccctggacgacctgcccctgcccaacaaggaggccgtgatcgacgccctcctgtccgtgcagttctccgagttccacgccctgtccctgaaggccctgcggaacatcgtgcccaagatggagctgggcctgcggtacgacgaggcctgcacccagagcggctacgaccacagccagcccttcgaccccgagcggcagaagtcccagagcctgccgcccttctacctgggccacgaccacctgagccggatgcggctcaacgaggacgtgggggacctcccccgcaaccccgtggtgatgcgggccctgaaccaggcccgcaaggtggtcaacgccctggtggggaagcacggggccccgcactccgtgcacatcgagatggcccgggacctgtcccggcccctgaccgagcggcggaagatccagaaggagcaggacgactaccgggacaagaacgacaagaaccgctccttcttcatcgagcagttcaaccgggagccccggggccaggagttccagaagctccagctgtaccgggagcagtccggcaagtgcctgtacagcctggccccgctggacctctcccggctgctggagatgggctacgtggagatcgaccacgtgctgccctactcccgcagctacgacgacagcaagaacaacaaggccctggtgctcaccaagcagaaccgggacaagtccgacctgaccccctacgagtacctgcagggggcccaggacacggaggcctggatcaagttcagcgccttcgtgaagtccaacaagaactaccgggccgccaagcggaaccggctgctgaccaaggacttcgacgaggagaacgccaaggacttccaggagcggaacctcaacgacacccggtacatctgccggtacttcaagtcctacctggaggagtacctggagctgtccgacgagtccgagcaccggcgctgcgtggtggtgaacgggcggctgaccgccttcctgcgggcccggtggggcctgcacaaggagcggtccgagtccgaccgccaccacgccctggacgccgccgtggtcgccgcctgcacccgcgggatggtgaagcggctggcggactacgccaagggccgggagctgcggtacgtgcaggccgactccatcgaccgggaaaccggcgagatcatcgatttcgaccggtacaagaagctggagaacgagttcccccagccctggcaggggttccggggcgagctgctggcccgcctgaacaccgacgacgtgtccaccctgcgggccagcctgagcaagctggggacctacagccgcgaggagatcgaggccgtgaagcccctgttcgtgagccgggccccgcagcgccgcaacagcggcgctgcccacatggacaccatctaccagcagaccacccggctcaaggacgagcgcaagatctcccagaagatcaagctcgccggcctgtccttccggcagaccaagaaaacccccaagcccatcaccgagcagatcgagcagttcgtgaagaagctggccgacccccaccgcaaccagaagctgtacgacgccgtctgcgaccggctgaaggccttcgccggcgacggcaagaaggccttcagcgccgagaaccccctgtacaagcccgacaagaacgggaaccccacggggcccatcgtgcgcaccgtcacgatgtcggagcgcatgagcgggatccccgtgcggggcgggctggccaagaacgagacaatgctgcgggtggacaccttcagcaagggcggcaagcactacctggtgcccgtgtacgtgcaccacaaggtgaccggcctgcccaaccacgccatcgtgtccggcaaggacgaggccgactggcgggaggtggacgagacattcgagttcgagttctccctgtaccccaacgacctgctgcagatctgcctgaagaagcagacccacctggggtacttcgccggctgcaaccgcagcaacggcgccatccacctgtgggcccacgaccgcagctccaaggtgggcaagaacgggctgatcagctccatcgggatccagcgggccaagcacctgaagaagttcgaggtggacgtgctgggcaaccggttcctggccaaggccgggaagcgggacggcctggccaagcggcccgccgccaccaagaaggccggccaggccaagaagaagaaggactacaaggacgacgacgacaagtaa

SEQ ID NO: 631 - DNA, 4260 bp, synthetic construct
  source 1..4260: mol_type = other DNA
atggccccaaagaagaagcggaaagtcatgaagcgggtgctcgggctggacctgggcaccagctccatcggctgggccctggtgaacgagtccgagaactccgacgagcagtccaccatcgtgaagctgggggtgcggatcaaccccctgagcgtggacgagctccagaacttcgagaaggggaagtccatcaccaccaactccgagcgcaccctgaagcgcagcatgcgccggaacctgcagcggtacaagctgcggcgggaggagctcatccgcatcttcaaggagtccggcttcatcgccgacgagtccatcctgtccgagaacgggaacaagaccaccttcgagacataccgcttccgggccaaggccgtgaccgagcggatccagctggagcagttcgcccgggtgctgctgatgatcaacaagaagcggggctacaagagctcccgcaagctgaagtcccaggacgagggccagctgatcgacggcatggaggtggccaagcggctgtacgacgagaacctgacccccgggcagctgagcctgcagatcttccagagcgggaagaagaagctgcccgacttctaccgcagcgacctgcagctggagttcgaccgcatctggaacttccagcaccagttctactccgaggtgttcaccgagaacctgaaggaggagctgcgggagaagaacaagaaccagacctgggccatctgcgagaagcccttcgggatcgtgggcatcaagcgcgacaccaagggctacgagctgaagaaggagaacctgatctggcggaccaaggccatctccgtgcagatggacctggagcgcctggccatcgtgttccaggagatcaacagccagatctccaacaccagcggctacctgggcgccatcagcgaccgctccaaggagctgtacttcaagaaccagaccgtggggcagtacctgatgaagcagctggacaccaaccccaccgccagcctgaagaaccaggtgttctaccgccaggactacctggacgagttcaacaccatctgggagtcccagagccggttccacaaggagctgaccgaggagctgaagaaggccatccgggacgtggtgatcttctaccagcggcagctgaagtcccagaagggcctgatcagcttctgcgagttcgagtcccgccagatcgagatcgaggtggacgggaagatcaagctcaagaccatcgggcagcacgtgatcccccggtccagccccctgttccaggagttcaagatctggcagatcctgaacaacatcgaggtgatcgtgaagggcaagaacatccgcaagcgggagctgtccatcgtgcccgacgacatcgagaacctgctgatgaacgagggccggcggaagctccaccaggaggagaaggagcgcctggcctccgagctctccatcaaggagaagctcaccaaggccgaggtgctcaagctcctcttcgagaacccccaggagctggacctgaactacgagagcatcgagggcaaccgcacccaggcccggctggtggaggcctacaagcagatcatcgagctgaccgggcacaagatcgacctgaagaagtccgccgaggagatgctcaagagcatctccgacatcttcagggccctggagtacaacgccgacatcctgtacttcgacagcgagaagccgctggacaagcagcccatgtacaagatctggcacctgctgtactccttcgagggcgacaacagcaagaccggcaacgagaacctgatctccaagctgagcgagctgtacggcttcgaggaggagtacgccagcatcctggccaacatcaccttccaggatgactacggcaacctgagcgccaaggccatccggaagatcctgccctacctgaaggagggcaacatgtacgacatcgcgtgcaagtacgccggctaccggcactccaagtcctccctgaccaaggaggagatcaagaaccggcccctgaagaaccggctggacatcctgcccaagaacagcctgcgcaaccccgtggtggagaagatcctgaaccagatggtgaacgtgatcaacgccatcatcgacaactacgggaagcccgacgagatccggatcgagctggcccgggagctgaagaagaacgccaaggagcggcaggacctgacccagatcatcaacaagaccaccacggagcacaaggccatcaaggacaagctgaacaaggagttcggcctgccccacgtgagccgcaacgacatcgtgcggtacaagctgtacgaggagctgaagatcaacggctacaagaccctgtacagcaacacctacatcccccaggagaagctgttctccaaggagttcgacatcgagcacatcatcccccaggcccggctgttcgacgacagcttctccaacaagaccctggagagccgcaccgtgaacatcgagaagggggacctgaccgcctacgactacgtgcggaacaagaccgacgccaagggcctggaggactacctgtcccgcatcgaggacctgctgaacaccggcaacatcagcaagaccaagtacaacaagctgaagatccaggaggaggacatccccgacgacttcatcgagcgggacctgcgggacacccagtacatcgccaagaaggccaagacgatgctggagtccctggtgcgccgggtggtgtccaccacggggagcatcaccgccaagctgcgggaggactggcagctggtgaacgtgatgcaggagctgaactgggacaagtacaacaagctcggcatgaccgagatcttcgaggacaaggacggccggaagatccggcggatcaagaactggtccaagcggaacgaccaccgccaccacgccatggacgccctgaccgtggccttcaccaaggacgtgtacatccagtacttcaacaacatcaacgcccggtacgacaagaacagcaacgcctacgccatcgagcagaagtacttccacgaccgcaaggtggtgccgcccatgcccctggacatgttccggagcgaggccaagcggtacctggagaacaccctgatctccatcaagaccaagaacaaggtggtgaccaacaacatcaacatcaccaagaacaaggccggcaccaacaagaagcggcagcagacccccagggggcagctgcacctggagactatctacgggtcccagaagcggtgtatggtgcgggtggagaagatcgacggcaagttcgacaccgccaagatcgagactatctccaaggacaccttcaagaaggccctgctcgaccggctgcacctgtacaacgatgacgcccagaaggccttcaccggcaagaacggcctgagcaagcacccggtgtacatcgtggacaacgccggcacccggcacagcctgcccgagaaggtcaagaccgtgaccttcgagacagtgtacaccatccggaaggagatcgcccccgatctcaagatcgacaaggtggtggacaagcagatccagcggctgctggagcagcgcctgtccgagttcaacggggacaagaagcgcgccttcagcaacctggacgagaaccccatctggctgaacgaggagaaggggatctccgtgaagcgggtgaccatcagcggcatcagcaacgccgagcccctgcacgaccgcatcgacaaggacaagaacctgatcctggacgacaacggccacccggagcccgtggacttcgtgaacacgggcaacaaccaccacgtggccgtgtacatggactccaacggcgacctgcacgagaacgtgatcagcttcctgaaggccgtgacccggaagaagctgcgcctgcccatcatcgagaagaactacaagtccgaggaggggtgggtgttcctcttctccatgaagaagaacgagtacttcatcttccccaacaaggaaacctgcttcaaccccaacgagatcgacctgctggacaccgacaactactacctgatcagccccaacctgttccgggtgcagaagttcaccatccgggactacttcttcaggcaccacctggagacaaacgtgtccaacgacagcgagctccggggcgtgtcctggatccgctgcgggctgaacgacatcaagggcatcgtgaaggtgcgcatgaaccacatcgggcagatcatctccgtgggggagtacaagcggcccgccgccaccaagaaggccggccaggccaagaagaagaaggactacaaggacgacgacgacaagtaa

SEQ ID NO: 632 - DNA, 4149 bp, synthetic construct
  source 1..4149: mol_type = other DNA
atggccccaaagaagaagcggaaagtcatgaagcaggactacttcctgggcctggacatcggcaccgactccgtgggctgggccgtgaccgacacctcctacaaggtgctgaagtgcaacggcaaggccctgtggggcgtgcggctgttcgacccggcccagcccgcggaggagcggcggatggcccgggtggcccggcggcggctggagcgccgcaaccagcggctgaagtggctggagcaggtgttctccgaggagatcgccaaggtggaccccgccttcttccagcggctgcgggagtccaagttccgggaggaggacaagaagtccgactaccccctggggcggtacaccctgttcgccgacaaggcctacggggacaaggacttccaccgggactaccccaccatctaccacctgcgccgggccctgatcgccgaggcccaccccttcgacgcccggctggtgtacctggccgtgcaccacatcctgaagaaccggggccacttcctgttcggcgacatgtccatcgacgccatcaccttcgaggccagcttcgagaagctgcgccagcacctgctggaggcctacgagctgaagctggaggtgagcgacctggacagcttcagctcggtgctgaccaacaggaagctgagcatcaccgccaagagcgccaagctgatcgagctggccgggctgcccaaggagaagggccccgtgcaggccatgatgcagctgctggccgggcggaaggtggccctggacgccctgttcgacgaggagctgcccacggacgacgtgcccagcttctccctgcgggacgacttcgaaaccgtggaggggaagctgatcgaggtcctgggcgacaggatcgacctgatccacctgctgaaggagatctacgactgggccctgctggccgagctgctgaacgggtaccggtacctgagcttcgccaaggtgcagtccttcgagaagcaccgggtggacctgaagcggctcaaggggatcctgaaggccgtggacggcaaggcctacgccgagatgttcaggcacgccaagaaggacctggacaactacctggcctactgcggccacggcgccaagggctaccactgcgacgccgacgcgttctacaagtacctggccaagcagctgaaggccatcagcccccagaccgaggagatccggaacgtgctgcaggaggtggagtgccgggacttcctgcccctgcagaccaccaaggacaactccgtgatcccccaccagctgcacgaggccgagctgaagctgatcctgaagaacgccgcccagtacctgcccttcctgaacgagactgacgagacaggcctgaccaagaaggagcagatcctgcaggtgttccgcttccggatcccctactacgtggggccgctgaacgagaagtccaaccggtcctggatcgtgcggagccccgagaagatctacccctggaacttcgagcaggtggtggacatcgggaagtgcgccgagcggttcatcgccatgatgaccgccaagtgcacctacctgggggaggacatcctccccaagaacagcctgctgtacacccggttcagcgtgctgaacgagctgaacaacctgcgcatcaacgggaagaagatctccgtgaagcagaagcagcggatctacatcgacctgttcctgcacgggtacaaggtgagccagaagcggctgaaggactacctgctggccaacgggatcatggagaaggccgacgtgatctccggcatcgacggggacttcaagtccaacctggccccctggcacgcctacgcctggctgctgaaccgggagaacggggtggacatcgccgaggacatcatccggcacatcaccctgttcggggaggaccgcaagctgctggagcggtggctgcgggactactacagcgccgccctgagcgacgaggagcggcgccaggccctgcggcagaagtactccggctggggcaagctgtcccgggagttcctgaccatcatcttccacgtggaccccaacaccggggaggccctgagcatcatcgacgccctgtggaacaccaacgacaacctgatggagctgctgtccgggcggtacaccttcctggaggccgtgaaggagtactgcgaggacaacaccgacatgaagtccgggaccctgcaggactacctggacgagcactacgccgcccccgggatcaagcgggccatccaccagaccgtggccatcgtgggggagatcgagaagatcatgaagtgctcccccacccgcgtgttcgtggagatggcccgggaggacggggagaagggcaagcgcaccgtgacccggaaggccgagctgtccggcctgtacgccaagtgcggcgaggaggccggcgagctgctggagcagctcgaggcccggaccgagggcgagctgcggcgggacaagctgtacctgtactacacccagctgggccgctgcatgtactgcggcgagcccatcgacctgaaccggctggacgtggactacgacatcgaccacatctacccccagtccaagaccaaggacgacagcctgcagaaccgggtgctggtgaagcgggagctgaacgcccgcaagtccgacgagtaccccctgagcccccagacccggaccgcccggcggcccttctgggagatgctgcgcaccaagggcctgatctcccagaccaagttcgagcgcctggtccgggcctccggcttcaccgagaacgagatggagggcttcatcgcccgccagctcgtggagactcggcagagcacgaagatcgtggccgagctcctgcagaaccggtacggcgacaccagcgacgtggtgtacgtgaaggccggcaacgtgtccgtgttccggcaggaccagcggatcggcgccaacggcaagcagaagcaggccggggtgtgcggccacaacgaggtgaccatccaggaccccctgttcgtgaagtgccgggaggtgaacgacttccaccacgccaaggacgcctacctgaacatcgtggtgggcaacgtctaccacgtggtgttcaccaagaaccccctggcctacctgaaggccagggacttcaagtactccctgaaccacatctacgactacgacgtggtgcgggacggggagcgggcctggaccgccggcgccgacggcaccatcgccaccgtgcggcacgtgatggggaagaacaacatcctgtacacccgcatggccaaggaaaccaagggccccctgttcgacctgcagatcgtgggcaagaccaaggggcaggccgccgtgaagtccagcgacccccggatgaccgtggacaagttcgggggctacaacaagcccaccggcacctacttctgcctggtggagcacaccgtgggcaagaagcaggtgcggtcgctggagcccgtgctgctgatgcacaaggccctgtacgagaagaaccccatggactactgcacccagcggctgaacctgaaggacccccggatcctgatcagctgcgtgaagatcgacagcctgatcagcttcgacgggttccggatgcacatcagcagccggagcggcaaccaggtgcggtacaagaacgccaaccagctggtgatcgccagcgagtggcagacctacttcaagaagatctccaagtacctggaccggtgcaagaaggccaagaccgacctgcccgtgaccctgttcgacgggatcaccagcgaggagaacatccggctgtacgagctgctgctggagaagctccgcaccagccggtaccacgtgaagtacgagacagccgccaccaccgtggccgagaaccggggcaagttcaacggcctggccgtgccggagcagtgccgcatcctgatgcaggtgctgaacctgttcgcctgcaacgtggacggggccgacttcaaggccctgggcggcaaggagggcgtggggatcgtgcagaccagcaagaacctgtcctcctacagcggccacagcatcaagctgatccaccagtccgtgaccggggtgttcgagcaggaggtggacctgctggccgaggacctgcccaagcggcccgccgccaccaagaaggccggccaggccaagaagaagaaggactacaaggacgacgacgacaagtaa

SEQ ID NO: 633 - DNA, 3420 bp, synthetic construct
  source 1..3420: mol_type = other DNA
atggccccaaagaagaagcggaaagtcatgcccttccgcttcgccttcgacctgggcaccaccagcatcggctgggccgtgtacgagctggaccccgtgacctggaaggagcagaagcggggcaagcccgtgggcctgcgccggctgggggtgcgcatcttcgacgacgggcgcaacccccagtccggcaagtcccacgccgccaaccggcggctgccccgcacgatgcggcggcagcaggaccggcggctggcccggcggaagcggctggagcaggacctggccgactgcggcctcctgcccgaccgcggcgccgaccgggacgccctgttctcctgcgtggaccgcaacgggaagtccagccaccccggccagagctgcccccagagccccgacgccgactgccggaacccctaccggctgcgggcccgggccgccgccggcgaggtgaccctgcacgagctgggccgggtgctgtggcacatcagccggcaccggggcttcaagagcaaccgcaaggccgaccagggcgaggacgacagcgggctgatccggagcgccggcaaggccctggaggcccggctgaagtccgggggccaccccacctacggggcctacctgtggagccggctgcaggccggcgagggcgtgcgggtgcggccccagggcgacggggccgagaagcactacgagttctaccccacccgggacatgctggaggccgagttcgactgcatctgggccgagcagaccaagcaccacccccggctgaccgacgaggaccgggaccggctgcggggcaccatcttcttccagcgggacctgcggccggtggaccccggccggtgcaccttcttccccgagcggccccggctgccccggtggcacccggacgcccaggccttcctgatcctgcagcagctggggcacctgcggatcatccgggagactcgggagagccgcctggaccccgaccggcacgccgtgctgttcgacgccctgtacggcggccggaagatgacctggtccaacgtgcggaacaccctggggctgacgtcccaggacgagctgaacctcgccaacggcggcctgaagcacctgcacttcaacgaggtggccgcggctctggtgggcaccacccggaagcccgggcccctggccgcccggtggcccgagtacgacacggccacccgggaggaggtgctgaagcagctggcccagaccgagtcccccgacgccctgatccgctggctggccggggagctgggcctggacgccggcaccgccgccgccgtggagcggacccagctgcccgacggccacctgcggttctgccgggaggccgtggaggccctggtgaccgagatgcggagcgacgtgatcacctacagcgaggccgtggagcaggccccgctgctggccgccgccgacatccggcacagcgacgcccgccccgacagcggggtggacaacctgcccccgtacaacgagctgccggtgctgcagcggatgctgggcaccggcaccgggaaccccgaggacccccacgacgtgcggctggggcggatcgccaaccccaccgtgcacatcgggctgaaccagttccggcggatcatcaacatgctgaccgccgagtacgggaagcccgatgagatcgtgctggaggccgcccgggacctgtcccggagcccccgggagcgggccgaggtggagaagcggatcaaggccaacgagaagcggaacgacgggtaccgcaagcgcctggaggaggaggacgtgatcggccccggccagcgcgtgggggagctgttcctgaagatgcggctgtgggaggagctgggccggaacgaggccgaccggcgcagccccttcaccggccggcccatcagcctggccgacctccactccgaggtggagatcgagcacatcctgcccttcggggacacgctggacgactcccccgccaacaagaccctggccttccgggaggagaaccggcggaagggcaagctgagccccggcgaggccgccgcccggggcatcttcgaccagcagaccatcatcgacctgaccaagcacctgccccggaacaaggcctggcggttcctgcccgacgccatggaggtgtacgaggagcagaagtccttcgaggcccggcagctgcacgccaccgggtacctggcccgggtggtgcgggcctacgccgaggccctgttcgacaagcgggaccccgacggggtgaaccgcacccacgtctggatgctgcccgggcggatgaccgccctgctgcggcaccgctggggcctgaacctgggcgaccacaaccgcaaggatcggaacgaccaccggcaccacgccatcgacgccgccgtggtgggggtgatcgaccggcggatgatcgccggcctgcagcgggccgcccgcgcccacggcgccatgatgctggagcgggtgctgcccgacccgcccgaccccttcccggggttccgggacgccgtgcacgccgcggcccgcgaggtgcgggtgagccaccggccccggcacctgaccgccagcgccgacggccccagccgcacctccgggcggctgcacgaggccaccgcctacggcctggtgcgggacgtgcccgagaaccaggccgaccgcaccatcggcaacgtggtggtgcggaagcaggccaccgccctgagccggaaggagatcggccaggtgcgggacgtgaagctgcggcgggacctgctggaggccaccgagcccgcccgggccgccggcctgaaggagtccgaggccgagaagctgcgggcggagctgctggccgactggtcccgcaagaccggccaccggcggctccgcatcctgaaggccgagaaccccgtgcgggccgtgcacgactgcgccgggcgggcctacaagtacttcgcccccggcgaggtggcctgcgtggacatcatcgacgtggacggggtgtggaaggcccaccccctgtccgtgtgggacgccaacagcgggcaggggcgggcctggaacgacgcctacccctccggcaggttcgtgatgcgggtgcacaagaacgacaccctgcagctgttcgactgggacgacgaggaggaggaggtggtgccggggtccaactccatcaagcgggtggtgcgcctggagcccagcaacaagcggctgcggctgtgcgacctgaaggaggccggcaccctgcagaagcggcacaaggacgaggacgacgacttccgctgggacctggcctccatcagcaagctgaagctgcggcgcgcccggcgggtgcggatcgacgagctgggccgggtgcgcatcatcccccacgggatggccaagcggcccgccgccaccaagaaggccggccaggccaagaagaagaaggactacaaggacgacgacgacaagtaa

SEQ ID NO: 634 - DNA, 3636 bp, synthetic construct
  source 1..3636: mol_type = other DNA
atggccccaaagaagaagcggaaagtcatgtccaagaagaagtccagccggtaccaccagcaggccgagcagatccggaaccggctgaacaaccggccctacaccatcgggctggacatgggcgtggggtccatcggcctggccgtgatcgccctggaggagatcggcggccggctgaccagcaccgaccccatcttcaccaccagccggatcttcaccccctccaccggggcctccgagcggagggggaagcgcggccagcggaacagcatccgccacaagagcaaccggctgcgcttcctgtggaagctgctggccagccagaacctgatgctgcccctgagcagcgaggccgtggccgaccccgccaccctgcggttcgacgacgaaacccgcaagaaggacccctacaccctgcggctgaaggggctgagcgagcagctgagcctgcccgagctgggctacagcctgtaccacatcgccaaccaccggggcgccagcagcatccgcaccttcctggacgacgagaagtcccccgacgacgagaagctggacgagcagatccgggaaaccgagaagctggccaaggagaaggggctgggcaccttcatcgaggtgctggccgccttcaacgagaacaagctgatcgggtaccgcaacatcgacaagctgaaggccagcaaggtgcccgtgcccacccgggacatcatcgagaacgagatcaccaccctgctggagaaccagtccaccttctaccccgagactctgtccaccgagttccagaagaagatcctggacgccatcctgtacgagaacgagaagatcgtgcccgaggccggcaactgcccctactaccccgacgagaagaagctgcccaagtgccacttcctgaacgaggagcggcgcatctgggaggccatcaacaacgcccgggtgatcatccccgagcagcaggccaaggggttcatcaagatgatccccacccccttcaccgaggacgagcggaaggacctgttcgtgttcctgcgggaggggaaggacctgacccccaccgccgtgaagcggatgttcgagcagtacaagaactgggacatgaccctgcaggggcgggacgccaagaagcagaagatcaagggcttccgcttcaaggacctggaggagcggcccttctggaagtccttcagcgaggaccagcaggaccagttcctctacgcctgggtgaacacccccgacgacaagaagctgaagtgcctgctgatcgacaccttccacctgtccaacgacgtggccaccgacgccctcaagacggtggagctgatcggggactacgccccgatcggcaagaccgccaccaagctgatcctgaagtacctggaggacggggcctcctacacggaggccatcgagaagggggtggaggccggggagctggacgaggtcggccagtgggaggtgcaggagaagctgccctactacggcaagatcctgaccggctccacccaggccatcatgggcaagtactggcactccgccttcaaggagaagcgggacctggccggcttccacaagcccaagacctactgggaggaggagtgctacgggcggatcgccaaccccgtggtgcaccagtccctgaacgagctgcggaagctgctcaacgaggtgatcgacatcctgggcgacaagcccgccgagctggtggtggagctggggcgggagctgaagatcgggtccgagatgcggaacaagatctccatggaccagaacaagcgggagaaggagtccgagcggctgtacgccaagtactgcctgcccaacaacctgggcaagcggtacatccagcacttccgcctgctgaccgagcagaagttcatctgcccctactgcctcaagaccatctccatcgcggaggtggccgggggcaccgccgacatcgaccacatcttcccccggcgggagactgccgacgacagcctggccaacaaggtggtgtcccacggctcctgcaacaaggagaagggcaagcggacccccttcgccgccttcagctcccgggacaactggtcccagatcatgcactacatggccaccaaccccgacatgtacgccaagcggaagaagttcgagaaggacgaggaggagtaccagaagtacctggagtcccggggcttcgtgagccggttcaagaccgacaacagctacatcgccaaggccgtggtggagtacctgcggtgcctgttccccaccaacgacctgaactccgtgcggtccctgaacggccgggagacaagcatcctgcgcaagtcctgggacctgcagaagatcagctcggagctgggggccctgcacatcctgaagaacaaggatgagaacgagctgggccggaaggaccgcaccgacaaccggcaccacgccctggacgccctggtggccgggtactgcagccggtccctgatcaagaagatcaacgacctgagcagcaagggcatccccgccgaggagatcgagcgggccctgcccgtgcccggcttccccgagacaaccatcgagacagccaacaaccagaaggacgtgttcagcaagaagatcaaggccttcctggagctgaacggcttcatcagcctgaagatcgacaccgccgtgaacggccccctgctgaaggacaccatctacagcatcctgggggccaacgagcacggcgaggagctgatcttcgtggtgaagaagtccgtcagcaccatctccgtgaaggagggctccctggaggaggtggtgaaggccatccacgggcggttctccgccaaccaccccaagtggtacagcgacgagctcaagaccaagatcgagggcatccaggaccacaaccagaaaaccatcacccggtaccaggagagcctgcagaaggctcagcagatcctggaggccaacaacgagaagaacaaggaggagggcaagaagcccctggagctgtccgcccggaacatctccaagaaggccctggagctgtgcgggggcacctactacctgctgagcaacaacacccggcagaaaaccttcgtggccaaggagcccaccaagcagaccaagggcttcgcctacgacaccgggtccaacctgtgcctggacctgtaccacaacaaggagggggtgctgcgcggggagatcatccggaacatccaggccatgaacaagaacttcatccccaagtacaagcaggccggcttcagcctgtacgagcggatctaccagggcgacgtgctggagatcgagggcaccagccccgtggagctgacggagaagtcctccggcagcgacaaggtggcctccgtgcggacccccaacgccctgtccaaccgcaccttcgtgtccgtggtgaccttcaccgagacagtgagcggcatccaggccttcttcagcaacatctgcaagagccgggccgacaaggacgcctccttcagcctgggcagcctgatcaagctgaacgcccggaaggtggtgctgagccccgccgggctggtggcctacgtgagccgccccctgctggacatccccaaggaggagaagcggcccgccgccaccaagaaggccggccaggccaagaagaagaaggactacaaggacgacgacgacaagtaa

SEQ ID NO: 635 - DNA, 3306 bp, synthetic construct
  source 1..3306: mol_type = other DNA
atggccccaaagaagaagcggaaagtcatgggccggtccaagaacggggccatgcagcggtaccggctgggcctggacctgggcaccaactccatcggctgggccgccgtgaccctggacgacgacggccagccctgcggggtgctggacatgggcgtgcgcatcttccccgacgggcgcaaccccaccgacaagaccagcaacgccgccacccggcgggtggcccgcggggcccgccggcggcgggaccggtacgtgcagcggcgcagcaacctgctgaaggccctgatcacgtacgacctgatgcccaccgactacaaccagcggcggcagctggccacccgcgacccctacaccctgcgggccaaggccctggaccaccccctgccgccccacgagctggggcgggccctgttccacctggaccagcggcgggggttccagagcaaccgcaagaccaccggcgacgacgacgacgccgccaagcagatcgggcccaagatcgagggcctgaacaagagcatggccgccagcggggcccggaccctgggcgagttcctggcccgccagctggagcagggctacgccgcccggttccgggagggggccgagttctaccccgagcgggccatgtacaaggccgagttcgccgccatccgggccgcccaggagcggcaccaggccctgagcgccgcccagtgggacaccctgcacgagatcatcttctaccagcgggacctgaagtccgtggagcccggctggtgccggttcgagcaccaggagaagcgggccgccaaggccctgcccgtgttccaggagttcaggatgctgcacgagatcggcaacctgaagctgcacgtgggcagcgagcccgagcggcccctgaacgacggggagcgcgagcgggccctggagcggctgcgggccggcaaggacatcaacctgaagaagcccgtgaaggccctgggcctgcccgccggcgccaccttcaacctggggcgcggcggggtgcggaccatcatcaagggggacgaggccaccgcccggctggtggagcagcggaagaagggccagcccacccagaccctgttcgggaagcggtggctgaccctgtccctggacgagcgcaacgagatcgtgcgctccctgctggacaccgaggaccccgccgtggtgcggcgcaaggcccgggagaactggggcctgaccgacgcccaggcccaggccgtgtccgccgtggtgctgcccagcggctacggcgagctgagcgagaaggccatcaagaagctgctgccccacctggagcggggcctgcgctacagcgacgccgtgaccgccgctgactacctgcaccacagcgacttccggaacgccgaggcccacgagcggctgccctactacggcgccgtgctggagcgggacgccgtgggggccgaccccaccaaggacccccagcgcgacggcgaggtggcccggtacggccgcatcggcaaccccaccgtgcacatcggcctggggcagctgcggcggatcatcaacaagctgatcgccgtgtacggcaagcccgaggagatcgtggtggagctgggccgggacctgaaggccaacaaggacgaccgggactggtaccggcggcagcagcgcgagggcaaggcccggaacgagaagtacaaggagtggttcggcggggtggagccccgcccccacacccggctgaagctgcggctgtgggaggagcagggggagagccaggcccggttctgcccctacaccgggaagcggctgagcttcgagatggtgatctccgaccagacggagatcgaccacatcctgcccttcagccagaccctgcacgacagcctggccaacaaggtggtgtgcctggccaccgccaaccggtacaaggggaaccagtccccctacgacgccttctcccacaacccgcccgggtacgagtaccaggccatcctggcccgggccgccaagctgcccgacaagaagcggtggcgcttccagcccgacgccatgcagcagttcggcgggaagcgcgacttcctggagcggcagctgaacgaaacccggtacctgtcccggaccgcccgggactacctggcctacctgtacgacgagcagaccgagcgccggcgccgggtgcgggccgtgcccgggcacatgacggccctgctgcggcggggctggggcctggagggcatgctgcgggagagcaaggacggcgagccctcccgcaagcagcgggacgaccaccggcaccacgccatcgacgccttcgtggtggcctgcaccgaccagggcctgctgcagcggttcgccgaggccagcaacagccggcacgaccgcgccgcccggctgcccgccgtggccggcgaggccccgccctgggaggggttcggccggtccgccctgcgccccttcctggaccggctggtggtgagctacaagagcgccgccggcgcccacagcgaccagaccaccgggcagctgcacaacgagactgcctacggcctgctggagcccgccggcgccggccccagcaaggtggtcacccggaagcagctgtccgccgtgaagcggaaggacctggaggctatggtgcccggccagcccctgcaggccgccctgctggccctgtgggaccaggtggccgccgagggcaagaagcccgccgacttcgccgagcgggccgccaacaagggcgtgctggtgaagggccagcgccagcgggtgcggcgggtgcgggtggtggacaagcagaccgtgatccccatcaaggaccaccgcaccggcaagccctacaagggctaccgcgccggcggcaacgagttcgccgacatctggcagctgctggacaagaccgagacttggaagctggtggccgtccccaccttcgacgccaaccagcccaagttcgacctggacaagtaccggccccaccccgccgccaagcggctgatccggctgcggatcgacgacatgggggccctgggggaggggccggagcgccggatcgtgcgggtgcggaagatcaccaacgcccagaccggggtgctggtgttcctggacgaccacaacgaggccaacgtgcccgaccgggtgcgcaagaaggagatgaagtccaacccctacagcgcccggcagctgaagcagcagggcttccggaaggtccgggtggacgagctggggcgcgtgcgcgaccccggcccccgcgcccccaagcggcccgccgccaccaagaaggccggccaggccaagaagaagaaggactacaaggacgacgacgacaagtaa

SEQ ID NO: 636 - DNA, 4701 bp, synthetic construct
  source 1..4701: mol_type = other DNA
atggccccaaagaagaagcggaaagtcatggccaagatcctgggcctggacctggggaccaactccatcggctgggccgtgatcaacgtgatcatcgaggacggcaaggtggtgaagtacatcagcatcgacgacaccggggtgctgatcttccccgagggggtggagcccaccaccatcgggaagggcgacaaggagcagtccaagaacagcacccggcgggagcaccgccagaaccggcggcaggtgtaccgcaagaaggtgcgcaagttcaagctcctgcagagcctgatcggcctgaacatgtgccccctgtccatcgacagcctgaaccagtggggcaagtggaaaaagaccgaaaagacggaggggaagaagttcccctccgagcccgagttcatcaagtggctgaagctcaacccctacgagctgcgctaccgggggctgagcgaggacctgagcctgctggagctgggccgggtgttctaccacttcatgcagcaccggggcttcctgtcctcccggaagggcggcgacgagggcgccatctacaagggcaaggacaacatgaccgggatcaacgacacccggaacctgatcgggaccgacaccctgggcaagaagctgtacgagatcctgcccaaggagggcgaggagttccactacaagaccgacgccaacggcaacgagctgcgggtgcggtcccgctacaccgagcggggcatgtacatcgaggagttcctgaagatctgggagcggcagaccgcccacctgggcctggacaacatgctgatcaagtccagcaaggtgcggttcctgaagggcaacctggagtccaacaggaaccgcaagaagatcaacaactacttcgacaagtacggcaaggagaacgtggagatcgccggcgggaaggtgaccacctacaaggagatcctgctcaagaccttcctcgccggcgagatcgagtccgggatcgacgggatcaagttcaagtccaacgagtccctgctgttctggcagctgcccctgcggtcccagaagaacctgctggacaactgcaggttcgagcagaaccggcccgtgctgatggggaacggggacttccgccggaagaacggcgagatcgtgtaccggtccaagaagccctgccccctgtcccaccccgagttcgagctgttccgctcctaccagatcatcaacaacatcaagtacggcaagggggagcggctgaccgacgaccagcgcaagctggtgctggacgtgttcagcaccaaggacaactccttcaagttcgagcagatcgtgaaggccctgaagctgacctacgaggagttcaactacgacctcgaccagaagatcagcgggaaccccaccatcaagaagctgaagcccctgttccccgaggaggtgtggaaccggtgctacgagaagatctggcactgcttctacttctacgacgacaacgtgcggctgctgaagaagctgaaggaggactaccagctgaagaacagcttcgacatcgagaagatcaagaagatccggatcgccgagggctacagcaacgtgagcctgaaggccatccggaacatcaaccccttcctggccaaggggttcaccttcagcgaggccgtggtgctgggcggcatcaagaacgccttcggcccccggtgggagttcttcaacatccccgacatcatcgggggcctggagagcgacgtgctgcggatcctgcacgagaaggggaacaaggagggggaggccatcaacaagatcaaggactacctgtccgaccccctgaacaactacggcttcagcgagaacgacccggccttcacccagctgtaccaccacagccaggagatcgagaaccgcgacatcgaggactgggtgcccgagctggagaacctgcggaaccccatcgtgcagcaggccctgtacgagatgcggcggctggtcaacgagctgctgcggaagtacaggaagcaggaccccgggttcatcttcagccggatccacgtggagatgggccggaacctgaagaacaccaagtccaagcgccaggagatctccgtgaaggccaacgagaacaccaacaagaacgagaacgcccggcagcggctggccgagctgggccagcggcccagccgggacaacctcctgcgctacctgctgtacgatgagatccagaagcacagctccggccccgtgctgtgcccctacaccgggaaggtgatctccgtggccgacctgctggacggcaccaacgccgtccagatcgagcacatcatccccaagtccatcagcctggacgacagcttcagcaacaagaccctgtgcgagagcaagttcaacaacctgaagggggagaaaacccccttcgagttctacctgatcaaccacgactacaagctgtgggggatccagaagcacgacaacatcaaggacggctggaacgagatcaccgagcgggtgtacaagatcctgccctacgccaaggcccgcaagttctccagcaagaacgagttcaaggtggacgacttcatcgagcggcagctgaacgacagccggtacatcagccggaaggccgtggagctgctgagcagcatctgcagcgacgtgcggatgctgcccgggcaggtgaccgccgagctgcggcacctgtggggcatcaacaacatcctgaaccccgtgtgcgggatgcaggactgcgaggtggaggtgaaggccgggaagcggctggcctactacgtgctcaccgacgagcaccgcaaggtgaagtccatgctgcgcaagaccaacgaccggcccaccaccaacagcaaccagctggtgctgtccgggatcctgaacaagaacgtgctgagcagcaagtacctgtccctgaagatcaacgtgcccaacatgatcgacgggaagtactgggtgctcgtgaacgtgagcgacaagaccagcctgttcccggtgttcgccaagaagcccgtgtccgacctggaccacctggtgctgaagggccgggtggagaagggcttcttcaagaacgacaccatcgggaacaacatcaaggtgaaggaggaccgggacggggcctactgggcccgcttcagcgtgaagaagttcgagctgaagatcgccgagaacaagggcaaggtcaagaccaagacctccgaggtcgccctgttcggcgaggtgaagaacggcctgttcgtctgccacatctaccagtgcaagacgaacctgcccgacggcaagtactgggccttcatgcagctcgacttcgaggggttcgagctgatgcgggtgaagaacatcaagcccgagactaaccagaaccagatcctgggctacgtgaccgtggacgagaacgagaatatggtggccgacatcgaccccgcctacagcaagcggaccgagcagaaccccggccgctactactgcgtgttcaacatcgagagcatcgagcaggacctgtaccccatggagaacgaccctcccaagcccaagaagggcgaggtcctgaccgaggccgtggtgtgggtcgatgaggccaccggggagatccgctacgaccccaagaagaaccgggaggaccaccggcaccacgccatcgacgccatcaccgtggccctgaccgagcagggcttcatgcagcggctgtccacctactacgccaaggaggagaacaagaaccgctccctggacaacagcgagaagttccccatgccctgggacggcttcgagaaggacgtgaagaagttcgccgagtccatcctgatcagccacaagcagaacaacaaggtgctgacccgcatcagcaagaagatcgagaagaacggggtgatctacaagtccgtgggcttcagcgcccgcgggcagctgcacaaggacaccgtgtacggcaagcggaccccgcccggccacaaggaggcctaccacgtgcggaagcccatcacctccctggaggacaagaagcagatcgggaaggtggtggacggggtgatccggaacctgatcctggagcacctgcgggacaactgcggcgtggacatctccaacgacagcttcaaggtgcccaaggacgccttcttcaagaacggcaagccccggctgttcctgcccaaccgcaagggcggggagccggtgcccgtgaagaaggtgcgggtgcgggagaacttcgggaacgcccacaacctgaagtcctccgtgaaccagtacgtggacctgaagaacaaccaccacgccctgatctacctgaagtacgacgggaagctgggcgaggcgatggtgtcctactgggaggccgtcgagcgccagaagcagggcgccgaggtgttccggctgcccgccgacgggaaggagtccatcgccatcctgcagaccaacgacatgttcctgctgggcctgagcaacgaggagttcgagaacaacaagaacaaccccgccttcctgtccaagtacctgtaccgggtgcagaacatctccagcaaggactacctgttccggcaccacctggcctccatcgtgaccaacaagaacgaccagtacaggatccagagcttcaaggccttccagaaggccaaccccatcaaggtgctgatcgacaagctggggagcatcgacagcatcgagaagcggcccgccgccaccaagaaggccggccaggccaagaagaagaaggactacaaggacgacgacgacaagtaa

SEQ ID NO: 637 - DNA, 3069 bp, synthetic construct
  source 1..3069: mol_type = other DNA
atggccccaaagaagaagcggaaagtcatgagcgacatcaccctggggctcgacctgggccccaacagcatcggctgggccctggtggacgagtcccgggagaagctgatcgccagcggcgtgcgggtgttccccgaggacgtgaaccacgagcccaacgaggccgacgagacaaagaccaagcaccggcgcgacaagcggctggcccggcggcagaccacccgccgggccagccgcaagaagcacctgaagaagctgctgtgcggcgccggcctgctgcccgtgaaggacaccgacctgcacgccctgctggagaacgacccctacgacctccggcggaaggccctgtacgagcgcctgcagccgtaccagatcggccggctgctgtaccacatgaaccagcggcgcgggttcaagtccaacagcaaggccgatcgggcccgcaagaaggagacttccaagatgctggaggagatctccgacctgcaggagaagatcggcagcgccggctgccgcaccctcggggagtacctggccgcccgccggctggacccccacgagcgggtgcgcggcaagcacacccgccgggagatgtacgaggaggagttcgacgccatctggaacgcccagcagaagtaccacaaggggctgctgacccccgagctccgccagaagatcgccggcacgatcttcttccagcgggacatgtactggcgcaccgccaccatcgggcggtgcgagctggagcccggccagcggcggtgcccccgcgccgaccgccacgcccagcggttccggatgctgcaggagatcaacaacctgcggctgctggacaccagcaccggcgaggagcgccggctgaccgaggccgagcgcaccgagctgatcaagtacctgtccacccagaaaacccggaccttcaaggacatcaagaagaagctggggctgttcgacacctgctccttcaacctggagcgggccgagtgctccagcctgaaggggctggagactgacgccatgctggccaacaagaacatcttcgggaaggactggtggcggctggacgacggcctgaaggacgagatcgtcgccgccctcatcgacgagaagtccgagtacgacgacgagtccctgctggagatcgcccagcagaagtggaagctcagcctggaggccgccgagcggctgctggacatcaacctgcccagcgggtacatgaacttcagccgcaaggccatcgaccggctgctgccccacctggagaacggcctggtgctgatgtccaacgacgagacacccagcgccctgcgggaggccgggtacctgcggcccgaccagcgggccatcaagtcctaccgcttcctgccccagcccccggacctgcccaaccccatcgtgcggcaggccctgcacgaggtgcggggcgtggtgaacgccatcctgcgcgagtacgggaagcccgaccgcatccacatcgagctggcgcgggaggccaagggcagcttcgaggaccggcggcagatcctgatcaagaacaaggagcgggagaagaagcgggacgaggcccgcaagtccatcgaggagcacggccgcaaggccacccgcgacaccatcgacagctacctgctgtggaaggagcagaaggaaacctgcatctacagcgggaagccgatcagcatctcccagctgctgggcggggaggtggacgtggaccacatcctgccctacagccgcagcctggacaacagcctgatgaacaaggtgatctgcttccgggccgccaacgccgacaagggggaccgcaccccctacgagtggctggccgagagcgaccccgacgcctacgagaagatgctgcagcggtcccggaacctgccctacgggacctacaacaagcagcggaagttcctgcagaagaacgtggagctggacgacttcatcaaccgccagctgaccgacaccgcctacatcagccgggaggtggtgtcctacgtgaagtgcctggacgtgaaggacgtcctgtgcacccggggcaaccacaccgccaacctgcggcggctgtggggcctgaactgcatcctgaaccccaactgggaggacttcaagaaccgggacgaccaccggcaccacgccgtggacgccatcgtggtcgccctgaccaaccggtcccggctgcaggtgctggcccggacccacgggcacgacatggagcccccgtggggcagcttccgggccgacgtggagcaggccatcaacgccatcaacgtcagccaccgggtgcagcggaagatccgcggcgccctccacaaggagacaatctacggccccaccaacgagaacggcaagttcacctaccgcaaggagctggagaacctgaccctctcgatggtggacgagatccgggacaagaccatccggggcctggtgatcgagcggctgaagaagcacgggatcgagcccggccgggggagcggcagctccatcccggccgccgtgtggaaggagcccttcctgatgccctccggggtgcccgtgaagaaggtgcgcctcgtcaagaccgacgagacaatccagcccatccgcaacggcaccgcctacgtgaagcccggctccctgcaccacctgtgcctcttcaagcagatcaacgagaagggcaagctggtgctggacgccgtgttcatcaccaccctggaggccgcccagcgcgccaagcggggcgagcccatcatccagaaaacccacccccagaaccccaccgcccagttcgtgatgtcgctcagcatgaacgagatgctgatcctggagcacaagggcaaggaggagctgtgccgcttcatcagcgccgccagcacctccaagcagatgtggttcaggatccacaccttcgccgggaagtccgccgaccggcgggggcagatctccaagaagcccaacaccctgaaggcccggaaggtgaccgtggaccggctgggccggatccgctgggccaacgacaagcggcccgccgccaccaagaaggccggccaggccaagaagaagaaggactacaaggacgacgacgacaagtaa

SEQ ID NO: 638 - DNA, 3381 bp, synthetic construct
  source 1..3381: mol_type = other DNA
atggccccaaagaagaagcggaaagtcatgtccatcagcttcagcttcgacatcggccacagcagcatcggctgggccgccctgaaggtggacagcaccgagcccgaggtgctgggctgcggggtggtggccttccagcccaaggactgccagaaccagaagcgggccggcttccgccggcagcggcggcacatcgccgccacccgcaaccgcatcaagcgcctcgaggccttcctgcagaaggccggcgtgctgtccgccgccgacgtgacctactgccgggagaacccccacccctggccctggctgctggccgcgcaggtgctgcgcggcgagcggaagctggaggagcgggagctgtgggccatcatcaggtggtacgcccacaaccgggggtacgacgggaacgccctgtgggccggcgaggacgccgacaaggacgacatcaagaaggtgaaggccgcccgcgacctgatggaggagcacaagaccaacacgatgtgcgagacagtgtgcgtgttcctggacgccgaccccaccagcaccgccaaccccaacctgaagaagtacttcaagggcgagaacgtggccttcccccggtccaccgtgatcgccgagatgcgcaagatcctcaagacccacgtcggcgagctggccaacatcaccgagcccttcatcaaggccctgctggacgactggaagtgcagcaaggtggccgggttcgacgccaagctgccccagcggtacttcgggggcctgctgttcggccagctgaagccccggttcgagaaccgcatcatccccaagtgccggctgaccggggaaaagacccccagcaagcactcccgggagttctaccggtaccgctgggccatgttcatgaacaacctgcgcgtggccagcgaccaggggctgcccccgcggcccctgcgggtggccgagcggtgcgccctggacaagatcatgcacgagaaggggtacctgatcaagtccgacctgaccaaggccctgaagaagtccctgaagctggagcccgtgaacctggaggccatgctcctggtgcccgagatggagaacgccctgaccctggaccccgccctgcgggaggtgtccgggaacaagcacctgaagaaggtgtggcccctggtgcccgacgagcggaagcgggtgttcctgaaccagctgttccacagccggaacttccgggggaagcccccgtccatcggccagtggaagatccggctggccgaggacggggccgccatcgagaagttcgacgaggtgttccccgagatcttcgaggccgagagcgagaagctggccaagaagaacctgaccctgacccagcaggagttcctggaccggcccatccacctgagcaagcgggcctccgggcgggccccctacacccggaagaagctgctggacgccgtggcctgcgtgatgcgggacgaggacccccgcagccacggcgggcccctggaggagactgaggaggcccggtcccggcagcagaacgagtccatcgaccgcaacagcaacaaccacctggtgcggcaccggctgaagatcttcacccggaccctggacgacctggtgaagcggtacgccaacgacgaccccgccagcgtcgcctgggtgggggtggaggtcatccgggacctggtgcagttcagcggcaagaccgagaaggagaaggccaagatcctgagcgaccagctgagccaccaccgcaagatcgtgaagatcctggaggagaagcgcgagagcaccggcggcaactgggagatcaacatcggcctgatccacaaggtccggatcgccgacgacatgggctggaagtgcccctacaccgggaacgactacaacctgaacaacatcatccacggcaaggtggagctggaccacatcatcccctacagcaagcggcccaccaacgccctgcacgccctgaccctgaccttccccgaggtcaaccggcagaagggggcccgcaccgccctcgagtacatcgaggacccccagaacgagcccccgcacagccccaaccagttcaagaagttcgtggagaacctgaagaagaagaacgggccctccaaggacgacgagatgcggtgccggaagcggaagatcgccctgctgacgccccactacgagaagtacggcaagggcgccggcaccaacgaggctgacgagggcgaggtggtggacgggttcaccgagggctccctgagccagaccagctacctgaacaagctggcggtgcaggagacaagccggtggttcaccgagtgcctgggcagcgaggtgaacagcccgcccgtggtgcagctgcccggcagcgtgaccgccgccacccggcggaagtggaagctgttcgggcagctgaacgaggtgtgccccgagactcggaacaaggccaaggccgacgtgcggaagatcacccacctgcaccacgccatcgacgccatcgccatcgggctggccgtccactacttccccaaggaggacggccggctgcacaccctgctgtccaggcgctccatccggaaccccgacgaccaggcctacctgaagaagaagctgggcgacctgatctgcttctgcaacaacgggtgctgggagctgcgggacctcagcccctgcgtgaaggagcagatcagcgagcgcctgctggagaagaaggtggtgcggcacatcccgcggacgatgcggggcctgcgggtgcaggagaacatctggggcgtcgagggggaggaccccgacgacgacaccaagctgcggatctccatgaagtcccgcggcgaggacgggaagaagtccaagtccaagaacaagtccgagcgcaagaccaagctgctgggctaccggcccaacgaggcctccgagggcaagctgaagcagctgaagggcgtgctgatcgtggagtacaacttcggcgtggccctggaccccgagcccaaggtgatctcctaccagcaggtctggaagcagatctccgagctgaaggaggccaacaagggccgccccgtgcggatcatccgcaacggggacatcatccgcatcccgcggggccagcgctacaagggcgtctggcgggtgcactccgtgaaggacaaggccatcggccccgtgctgaacctggccagccccgagttcgtgaacctggagcggaccctgaagatggaccgggagcgcgagtccgaggacgggaacaacccccgggccaaggaggacgtgcggctgcgcaccctcctgaaggacggcctggagatcctgaactgcgactacgccgggcacgtgcggaagcggcccgccgccaccaagaaggccggccaggccaagaagaagaaggactacaaggacgacgacgacaagtaa

SEQ ID NO: 639 - DNA, 3369 bp, synthetic construct
  source 1..3369: mol_type = other DNA
atggccccaaagaagaagcggaaagtcatgaacaccgaggtggagtcctccaccctgtaccggctgggcctggacgtggggaccaactccatcggctgggccgccatcagcctggacggggacgggaagccctgcggcatcctggacatgggggtgcggatcttccccgacggccgcaaccccaccgacaagaccagcaacgccgtgaaccggcggctggcccggggccagcggcggcgccgggaccgctacctgaagcggcggggcaagctgatcaagaccctgatcgagtttggcctgatgcccgccggcaaggaggagcggggcagcctggccaagtccgacccctacaagcggcgggccggggccctggaccgggaccggcccctgggccccttcgagctgggccgggccctgttccacctgaaccagcggcggggcttcaagtccaaccgcaaggctggcggcgacgacgagtccgaggcccagaccacccgggccgagatcgacgccctgcggaagtccatccgggagtccgaggcccggaccctgggcgagttcctggccgagcggcacgagaagggcaagaagggcgagaaggacggcaccgtgcgggcccggccggggcacgagctgtaccccgaccgggccctgtacgaggccgagttcgacgccatccgctgcgcccagaagccccaccaccccaacctgtccgacagccagtgggacaggctgaaggacatcatcttcttccagcggcccctgaagcccgtggaccccgggtggtgcctgttcgagcgcggcgagaagcgggccgccaaggccctgcccatcgcccaggagttccggatgctgcaggaggtgaacaacctgaagatcgtggtgggcttcgagcccgagcggcccctcaacgacgaggagcgcgctcgggccctggagcggctgcgggccgggaaccccatcaacctggagaagcccacccagaacctgcggctgccggtgggcgccaccttcaacctgtccatcggcggccgcaagtcggtgaagggggacgagacatccgcccggctggtgaccgccaagaaggagaagggcgagcggaaggccaaggacatcttcggctcccgctggcacgccctgagcctggacgagcggaacgagatcgccgggttcctcatcgacaccgaggagcccgaggccgtgcggcagaaggcccgggaggactggggcctgaacgacgcccaggccaaggccctgagcgagatcagcctgccggacgggtacgccaacctgtccgagaaggccatgcggaagctgctgccgcacctggagtccggcctggtgtactccgaggccgtgaaggccgccgggtacagccaccactccgacttccgggagggcgaggcccaggactccctgccctactacggggaggtcctggagcgcgacgccgtgggggccgaccccaccaaggaccccgagaaggacggggaggtggcccgctacggccggatcgccaaccccaccgtgcacatcggcctggggcagatccggcgcgtggtgaaccggctgatcgaggtgtacggcaagcccgaggagatcgtggtggagctggcccgggagctgaagctcaaccgggaccagatccgcgagctcgagcgccggaaccgcgagggcggcgagcgcaacgagcggttccgggagatgctcgagagcgccgagcagggcctgtccgccgacaccctgcagcggctgcggctgtgggaggagcagggccccgagcacgcccggctgtgcccctacaccgggaagcccatctccttcgagatggcggtcagcagccggaccgaggtggaccacatcctgcccttcagcaagacgctggacaacagcatctccaacaaggtgctgtgcctggccgggaccaaccgcaccaagggcgaccggtccccctacgaggccttcgggcacaacccgcccgggtacgactaccaggagatcctggcctggtccgacaagctgcccgacaacaagaagtggcgcttcaaggaggacgccatggagcggttcgacgacgagtccgccttcctggaccggcagctgaacgagactaagtacctgagccggaccgcccggacctacctgagccacctgtacgacgagaaaacctccgggcggcagcgggtccgggtgatccccgggcggatgaccgccctgctgcggcggggctggggcatcgaggggatgctgcgggagtccgagaacggggagccccctcggaagtcccgcgacgaccaccggcaccacgccatcgatgccctggtggtggccaacaccacccagggcctgctgcagcagttcgcctcggcctccgcctccgccgacagcgccgacgccaccgagcggctggcgtcgatggtgcccctgccctgggacggcttccaccgcaacgaggtgcagccgttcctggacaggatggtggtcagctacaagcaggaccacggcacccggggcgggctgtccaccaccgggcagctgcacaacgccaccgcctacgggctgatcgagcccctggaggacggcagctacaaggtggtgatccggaagaacctggacaagctgaagaagaaggacctggagagcgacgccatccgggaccccctgctgcggaaggccctgctgcggctgtgggaggaggtggagagcctggaggggaaggccaaccccgccaagttcgccgagcgggcgaacaccaagggcgtgctgatcgccggcaagcggcagcgcgtccggcgggtgcgggtggtggacaagcagcgggtgatccccatcaagaacgagtccggcaagacctacaaggggtacctgcccggcgggaacgagttcgccgaggtctggcggatgctggacggcaagtggaaaaccgtggtggtgcccgccttcgaggccaaccagcccggcttcgaccccaccaagttccgcccccaccccgccgccaagaagctgatgcggctgcagatcgacgacatgggggccctggggaagggcgagagccggcggatcgtgcgggtgcgcaagatcgacgccggctccggcgggcgcgtggtcatggacgaccacaacgaggccaacgtgcccgaccgcatcaagcaggacatgcggatgcggcgggagactggcgtggacaccggcatgaaggaggaggtgttcagcgcccagaagctgcggcggctgggcttccggaagatcggggtggacgagatcggccgggtgcgggaccccggccccctcaagaagcggcccgccgccaccaagaaggccggccaggccaagaagaagaaggactacaaggacgacgacgacaagtaa

SEQ ID NO: 640 - DNA, 3282 bp, synthetic construct
  source 1..3282: mol_type = other DNA
atggccccaaagaagaagcggaaagtcatgaagaacaccctgggcatcgacgtgggcaccaactccgtgggctgggccctgatcaacgagaacgggatcatcgacaccggggtgcggatcttcagcgagggcgtgaaccgcgtgaagggcgtggaggagtcccgcaacgtgaagcggcgggaggcccgcggcatccgccgcaagctgttccgctacaagctgcggcgggagctgctcatgcgcaagctggacgatctgaacatgtaccccgagcacttcaccgagactcccgccgagctgtacgagctgcgggccaaggggctggacgagcggatcaccctgttccagctggggcgcatcctgctgctgctgaacaagcggcggggcttcaagtccaaccgcaagtccgagcagagcgaggaggccaagtccaagtccgactactacaaggagctggacgagctgaacgagaagatcaagctgttcggctgccggaccgtgggggagtacttctacaccctgttcaagcaggggtcccagctgaacgacaacacctacgaggccaacgagcggatccgggcccggttcgtgtaccgggacaactacatcaccgagttcgacctgatctgggacaagcaggccgagttctacccggacacgctcaccgagaagaacaagatcgagatccgcgacaacatcatcttctacgcccggcccctgaagtcccagaagcacctggtggccaagtgccgcttcgagcccaagaagcgggtggcccccaagagcagcccccagttccaggagttccggatctggcacaccatcaacagcatccgggtggacgacaagaaggagatccacaggaagctggagcagagcgagaagctcaagctggccaacttcctgatggtgaactccgacatcagccacgccaagatcaagaagatcctgagcctggagtccagcgccagcctgaacgacctgccgcccaagatcaagggcaacaccacctacagcaagatcatgcaggtggtgggcaccgacaagttcaacagcctgtccgaccgggagctgttcctgatctgggagaagctgtactacgcccacgacagcgagtggctggtgaacaacctgcaggccaagcacggcctgcccctggacgtggccaagaagctggccaacgtggccctggagcaggactacggcaacctgtccaccaaggccatcgggaagatcctgaagcacctgaagcagggcaaggagtacaacaaggcctgcgaggaggaggggtaccggcactccgactacttcctggagggggaggagcgccctcccctgaccgagaagatcctggtgtccaacaacgacccggtgctgagccagatcatgagccccctggtgaagcgctcggtgaccgagtgcatcaaggtgatcaacgccgtgatcaagaagtacgggaagcccgacatcgtgcggatcgagatgggccgggacctgaacatgcccaaggacatccgggagaagtcccaccgcaacaaccgcgacaagcgggccctgcgggacgagtacgagaagttcctgaaggagaagttccacttcgaccgggtgggcaagtccgagctgctgaagttcgagctgtggctcgagctggagcactccggcgccgagctgagcaagctgaccagcgagctcagctcggacgacttccggcggttcagccggaacgtgaagcccagcgacaaggagaagttccggctgtggctggagtgcggccggatctccgtgtacacggggaaggtgatcagcgtcgagcgcctgttcagccccgagtacgaggtggagcacatcatcccgtactcggtgagcttcgacgacagcttcgccaacaagaccctgtccgagcggaccttcaaccgcgacaaggggaacaagacccccatcgagtacttcgccgagaacgaggatgagctgcggaagttcaagcagcgcaccaccaagttcgggaacgccaagaaggagcggctgctcctggaggagatccccgacgagttccgccccgaccagctgaacaacgaccggtgggtggccgtggccctgaagaagaagtgcctggaggccatcgagtccgtggaggtgaccaacggcgccgccacggccaagctccgccggtactgggggctgaacaccatcatcaagtccgaggaggacaagaagtcccgggacgaccaccggcaccacgccatcgacgccatcgtgatcgcctacacctccatccgcttcctccagcagatcagccggtaccactccctgcggatccacgacaaggtgatccaggaccgcttcgagcccccgttcgagggcttccggaacgaggtggtgaagttcgtgtccagcatcctggtgtcccaccgcaaggacaagcggctgctgagcacgaagaacaacaagtactaccaccggcggtccgggagccgggagcaccagaagggcatcatgtccgtgcgggggcagctgcacgaggagacaatctacggcaagatcctggacccctacagcggccgggaggagtacgtggtgaagaagcagctgagcaagctgacccccgagcaggtggacaagatcgtggacaagcccatcatcgagctgatcaaggagacagccgagctgaccggcaagtccatcaagcaggtcctgaacgaggacctggtgcagtacaacgaggccggcaagggcgtgcggatccgcagcgtgcggatcaaggccgtgcacaagccccagtccatcatcgtgaaggacaagaacggcaagatcagcgagcggaacgtgatgctgaagaacaactactgcgccaacatctacgccaacaagaaggggaagaagatcatgaacatcatctccttctacgacgcggtgaaccgcaagatccggaaccagagcctgatcgacgacttccccgagctggagtacctgttcaccatcacccaggacgactacctgctgatcctggacgagaacatcgacgacatccccgacgacaaggactacatcttcaaccacctgtacaagatccggaagttcaccggcaacgagatcggcatcctgcaccactgcgacagcgagaacaagaacctgtggcggatgaactgcagcaagcagaagtacatcaaggtggaggtggacatcctgggccggatcgagcggcggatcaagcggcccgccgccaccaagaaggccggccaggccaagaagaagaaggactacaaggacgacgacgacaagtaa

SEQ ID NO: 641 - DNA, 3267 bp, synthetic construct
  source 1..3267: mol_type = other DNA
atggccccaaagaagaagcggaaagtcatgaagtggcggctgggcctggacctgggcaccaactccatcggctgggccgccctgaagctgtccgaggaccccaccgactgcagcaagctggcctgcagcgagctgctggacctgggcgtgcggatcttccacgacagccgcgagcccagctccaacggccgggtgggggagtccctggccgtgcagcggcgcatggccaggggcatgcggcgcaaccgcgaccgcaccctgaaccggtaccgcaagctgatgcggctgctgatcgagttcgggctgatgcccgacaaccgcagcgagcgcaagagcctgaagtacctgaacccctaccagatgcgggccgaggccgtggcccgcgtcatcagcccctacgagctggggcgggccctgctgcacctggggaagcggcggggcttcaagtccaaccgcaagaccgacaccgacgacaaggagactggcaagatcaaggaggggatcaaggagctccgggacaccctggagggccagaccctcgggcagtacctgtggaagcggtaccaggacaacctgtccggggagaagtccggcaaggtgcagggcatccgcttccgggccgaggaccccttcttccccgaccgggagatgtacgcccgggagttcgatgccatccgctccatccaggagcacgcccacaacctgtcccacgaccagtgggacaggatcaaggaggagtgcatcctgttccagcacccgctgaagcccatcgagcggggccggtgcaacttcttcccggacgagtaccgggcctggaccgacacccccatcgcccacgagtaccgcatctggcaggagctgaacaacctgcagtggcgggacgaggagggcatcagccacgggctgatggcccaccagcgggacgccatcagcgagctgatgttccagcagaacgaggtgtccttcagcaagatcaagaagctgaaggacaaggaggggaagctgctgttccccgacatcgtggagttcaacctggagtccgagaagcggaaggggctgaagggccacaccatcgccgcccgcatcgccaaggaccccaccctgaactccctgtggcggatcctgggcaaccagtggaacgaggtgttcgagactctgcaccaggccaccgacgacgaggaggccgagaagaacctcgagcgcatctacagcttctcccccgagcagatcaagtccctgctcagcttccacctgtcccccgggacgcagaacgtgtcccggaagttcatggagaagatcatccccatcatgcgggaccagggcatccgctacgacgaggcggtgctggaggtgaccgacgacgacgggaaccccctgcaccacagcctgtccaccatcaaggccgagtacgacttcctgccgtactacggcgagatcctgaagggcgccctgtacgggggccaccccgagaagtgcagccccgaggagaaccccgaggtgcacttcggcaagatcgggaaccccaccgtgcacgtggccctgaaccagctgcggaagctggtgaacaccctggtggagcggtgggggaagcccgagcagctgcacgtggaggtggggcgggacctgaagctgcccaagaagctgcgcgagaagatcgagcgggagcaggccgccaaccagaaggagaacgagacaatcaaggccgagctggagaagggcggcatcaagcaggtgtcccgcaccgacctgatcaagtaccggctgtgggaggagctgggcaaggacaagctgctccggacctgcccctacaccggcaagaccatcagcttcagccagctgatcaacggcgaccaggtggagatcgagcacatcctgcccttctcccggaccctggacgactccagggccaacaagaccgtgtccaagacctgggccaacaagctgaaggggaacaagaccccctacgaggccttcggcaacaaccagcacgccgacaagggcatcgtgtgggaggagatcctggagcgcgccgccaagctgccccagaacaagcggtggcgcttcttccccgaggccatccacaggtacgagaaggacaactccttcatcgcccggcagctgaccgacaacgcctacatcagccgggtgagcgccaagtacctgagctgcctggtgccctacaacaagatcgtgatgatgtccggccagatgaccgggatggtgcggggcaagtggcggctgaacgagctgctgcccaagcccatcgtggacggcaaggtggacgacaactggaagtcccgggacgaccaccgccaccacgccgtggacgccttcaccctgtccctgatggacaggagcctgctgcaggagatcagccggatctccgggcggcggcccaccggcatcttcgacatcgagctgcccctgcccgacaccgggctggtggagaaggccaagcagcggctgtccgagatctacatctcctacaagcccgaccacgggcacctgggccggatgttcatggaaaccgcctacggcgtggtggacgagaagctgctggaccccgagttcccggactacaacctggtgacccggaaggaggtgttcctcctctccgacaaggagatcctgcacatccgcgggaaggccctgcggacccggatccagcaggccgtccgccggggcgccgagaagggcctgaagcccgccgagtccctgaagcggttctccgccaagaccggcatcaagaaggtgcgggtctgggtgagcaacaagagcgcccagaacatccccagcgccccctggaaggcctacgccatggagagctacgtgtgctgcgacatctggcgcatccccaaggggaagcccggcaagtggaagaagaacgactacaagtggcagggggtgttctggtcctacgccgagacagtcggggacgaccccgacaagaacctgaagaagccccaccccgccgccaagttcgagatgcggctgtacaagctggacaccgtgatgaccggcgagggcaagatctgccgggtggccggctaccacgccttccagaacaagctggacatccggcccctgaacaagaccgacagctcccagaacttcatcagcatcaacgtgctgggcagcaacggcctgaagaaggccatcatcaccgtggacggccgcatctgcagcagctgcaagcggcccgccgccaccaagaaggccggccaggccaagaagaagaaggactacaaggacgacgacgacaagtaa

SEQ ID NO: 642 - DNA, 3273 bp, synthetic construct
  source 1..3273: mol_type = other DNA
atggccccaaagaagaagcggaaagtcatgtccgactacatcctgggcctggacctggggcccaccagcgtggggtgggccgccatcctgatcgacaaggatggcaaccccaccgggttcgcccagatcaagaacgggcaggagtccatgcccgccatcggggtgcggatcttcgaggccggcgtggagaacctggggcaggggtcccaggagaagcccaagaacctggaccgccgggtgtcccggagcacccggcggctcctgcgccggaagcggggccgctacctgcgggtgaagaagctcctgcaggagaacaacatcatccccacccagaaggagagcatggacctcctgaaccagaaggacccctacgagctgcgggacaaggccatcaccaagcagatcggcctggacgagctcggccggatcatcctgcacatcacccggcggcggggcttcaagtccaaccgcaagacccccgacaaggacgcctccatgggggagatcaagaaggggatcaaccggctgaaggaggacagcaaggagaaaaccctggggcagttctggtacgcccagatccaggacaagcccctggaccccatccggaaccggcagggcggctaccactgggtggcccaccgggaccagtacatcgaggagctgcggaccatctacgagaagcagaagaactactaccccacgcagctcaccgagacactgtaccagaagctgaaccagaccatcttcttccagcagacctacgagctgtccaagcgcaagaagcgcaaggtgatcgggatgtgcagcctgatcaagggccagcggcggtgctccctggccgaccggcgggcccaggagttccgcctgctgcagaagatcaacgacctgaagatcatcatcaacgggaaggagtaccccctgaagaaggaccagcaccagatcctgtacgcctacctgatggagcacaaggaggccaagttcgacaagatccgggacctcctgaacctgcccgacgacgtgcggttcaacctgcactacaagaccaacgacaagatcctgggcaacgtgatcgactcctacttctgcggcaagaagatcttcggctgcaagcagtggaaaaccctggaggagaacgagaaggaggacatctggcagtactacatcaaggagtacctgtccgaccactccgacctgtccgccgacgagctgaagtcctactacgagaagaagtacgggctgaccgtcaaggaggccaaggccttcgacagcttcatgctgcccatgggcaacgtgagctacagcgccaaggtgctggacatcatcctgcccgacatgcggaagggcatggggctgtacgacgccatccaggggaagttcaagaagaagtggcggtgcctgaaggagctgcccctgcccatcaaggccaacgacttccactccaccaaccccatcgtggtgtccaccctgcaccaggtgcggaaggtggtgaacgggctgatccgggagctgggcaagccccgggagatcgtgctggagatgacccgggacctgaaggccaacgccgagcggcgggccgagatccagaaggatcagaagcacaaccaggacgagcggaagtcctgcgagaagcagatccggatcgagttcggctacgacgaaaccgtggccatcagcacccgggacatcaccaagtaccggctgtgggagagccagaagcacctgtgcgcctacagcctgaagcggatcgagctgtccgagctgttcacccggaacatcgagatcgaccacatcatccccgagtcgatgtccctggacaacacgatgtggaacaaggtggtgtgcttcgccaaggagaaccaggacaaggggcagcggacccccatcgactggctgggcgagcagtccgagcggttccagaccctgatggtggccatcaagaaggggtccctgggcaacgacacccggaagtgggagcggtactccatccgggccaaggacatcacggacaagtacacccccgagcggctgctgcgggacaccagcttcatcgccaccctggtgcgcgactacctgaagcggctgtacccgcaccacaccgccgaccagtgcgtgcgcaccaccaagggcggcgtgaccgccgagctgcggaacgtgtgggacatcaaccccatcctggccgacggggccatcgacaagaagaaccgcgacgacctgcggcaccacgccgtggacgccgcggtgatcgccgtgaccagcgtggggatgatccagaaggtgacccgcgcctggcagcagatctggccccggcggccctacgccagcgggaacatccccttcccctggccgtcctacgtggacgacctgctgaaggtggtggccggcatcaacgtgagccaccgcgtgcagcggaaggtgtccggggccctccacaaggacaacatctaccacctggagacaaacggccccaacgccgggaagtacaccaagcggcagccgctcaacaagatcacccggaagaacgccgagagcatctgcgaccggtccctccgggagttcatcatcaagcacctggaggaccacgggaacgacaccatccgggccttcgccgagccgctgctgtggcactgcaaggacggccgggaggtgatgatcaagtccgtgcggtgcaacaccgactacaagtccctcctgaagatcaaggagaacgcctacgtgcagagcgacaagaaccaccacatcgagatcttccggggcaaggtgaagggcaaggtggagtacttccacaaggtgtactccatctgggaggtgtcccagcagctgctgaagatgcgggggaagcgctcccagggcgagactgggcgcgccatcatcacccggcagaagccctgcccggacaacctggaggtgtccgacatggagttcgtgatgtccctggccaagggggagtccatcctgatcgacgacaagaaggtcgagaaccagcagatcctggcccgggtgcgggacttcaactccggcggggacagcctgtcctccgtggagctgaacatcgtgggccacaccctggcccgcgtggagggcaagatcgtgaaggacaccgccaacgcctaccggctgcggaacatcaacgagctggccaagctccacgtgaggaaggtgtccgtggaccccctgggccgcatccgctgggccaacgacaagcggcccgccgccaccaagaaggccggccaggccaagaagaagaaggactacaaggacgacgacgacaagtaa

SEQ ID NO: 643 - DNA, 4104 bp, synthetic construct
  source 1..4104: mol_type = other DNA
atggccccaaagaagaagcggaaagtcatggccaagatcctgggcctggacctgggcaccaactccatcggctgggccgtggtggagaaggaggacaaccagttctccctcctggacaagggggtgcggatcttccaggagggcgtgaagatcgagaagggcatcgagtcctccaaggccgccgagcggaccgagcaccggtccagccggaagatcaagttccggcggaagctgcggaagatcgagacactgaaggtgctcagcgagttcgggtactgccccgagctgtccaaggaggagctggacctgtggcggtacaagaagatctaccccaacaacccagccctccggaactggtggctgaccgacgacaaggagaacaagcacccctactactaccggcacctggccaccacccagaagttcaacctgaacatcgagagcgaccggttcaagctgggccggtcgttctaccacatggcccagcgccggggcttcctgagcaaccggctggagtccaccaaggagtccaacggcctggaggaggagaagggcgagctcaccctgggcgagtacttctaccagaagtacgagaagggggagaagatccgggacaactacacccaccgggagaaggactacctggacgagttcaaccgcatctgcgacttccagaacatccccaacaagatcaaggacaagctgctgaaggccatcttctaccagcggcccctgaagtcccagaaggggctgatcgggaagtgcgtgttcgagcccaacaagcagcggtgctcagtgtccaggcccgagttcgaggagtaccgcatgctgtgcttcatcaacaacatcaagatcaagacccccgatgacgagaagctgcggttcctgaacaacgacgagcggaagaaggtgatctcccgcttcttcctgcagcgggagcacttcgacttcgaggatctggccaagcagctggcccccaagaagcagtacaagttctacaaggaccgcaacaagaaccccgaggactggctgttcaacttcagcatgaaaaccaccgtgtccggctgccccgtgtccgcccggttcaaggagctgttcgaggacatcttcatggacaagcagttcaactacatcaaggacgagactgggaacacccccaagatcatcgtggacacgtggcacgccctgtacaccttcgacagcgacgaccggctgaaggagttcgcccacaagcacctgaacctgaacaacgagcagatcgacagcttcctgaagatccggctgaagcaggacttcgccagcctcagcctgaaggccatcaacaagatcctgccctacctgcgggagggcctgatctacagccacgccgtgttcatcgggaacatggaggaggccgtgcccaacaacatctggaacgacaaggagaaccagctgctgatcaagaacgccatcaaggacatcatcaacaaccacaacgacgagacaaccatcatcaacatcgtcaacgggttcatcaccaacgccaagcgggagaacaccacctggtccgaggagtccaaggccatcctgctggaggagctgaacaacaagatcatccagaccttcggcaagtaccggttcgagtccttcagcgaggccaaaaagacccacctgaccgagcgggccaaccagctgctgatcgagaacatgcccaagaactacgggaagggcgagcacatcaaggcccagcggatcgacgaggccgtgcagaccttcctgaccgacaacttcgggaaggtcaacacggagaagatctaccaccccagcgccatcgagacatacaagcccgccaagcgggccgacgacggcaacctgtacctgggcagccccatgaccagcagcgtgcggaaccccatggccatgcgggccctgcaccagctgcggaaggtgatcaacgagctgatcaaggagggcatcatcgacaccgacaccaagatcaacatcgagatgtcccgcggcctgctcaacgccaacgagcggaccgccctgcggcggtggcaggacgaccgcgagaagcagcggaaggagtacgccaacaagatcaaggagcacttcgggaacaactaccagcccagcgaggacgagatcctgaagtaccagctctggatcgagcagaagggcgtgtgcctgtactcctccgaggagaactgccagatcaacatcgaggacttcctggggaacaaccccagctgcgacatcgagcacaccatcccccgcagcctgtcctacgacaacagccaggagaacaagaccctgtgcaagaacgaggccaaccgcaagatcaagcggaacaagatcccctacgagctgtccaaccaccaggagatcctgctgcggatcgagcactggcgggagaagatcgagagcctggacaagcagatcgagatcaccgtgaagcgggccaagggggcctccgacaaggcccgcaaggacagcgagatccagaagcggcactacctgaccttcgagcggaactactggcggaacaagtacaaccgcttcacgatgaaggacgtgcccgacggcttcaagaactcccagatggtggacatcgggatcatcaccaagtactcccggctgtacctcaagaccatcttcaacaaggtgtacacggtgaagggctccaccgtggccgacttccggaagatgtggggcatccagaactcctacgagaagaaggcccgggtgaaccacatccaccactgcatcgacgccatcacgatggcctgcatggacaagtccaactacgagactctggccaagttctaccacgacagcgagaacgccttccagaacaacagcagctccaagccctacgtggagaagccctggcagtccttcaccgaggacatcctgagcctggagaacgagatcctggtgagccactacacccccgacaacctgcccaagcagagcaagaagaagctgcggaagcgcggcaagatccagtacaacgagtccggggagcccaagtaccagcagggcgactccgtgcggggcagcctgcacaagaaaaccttctacggcgccatcgagcgggaggtgatcaacaagaagggcgagagcgagaaggtgatcaagtacgtggtgcgcaagagcctggccagcctcgaggacaacaacatcaagaacatcgtggacgaccgcgtgcggaacatcgtgatcgaggcccggaagcaggagaaggagatccagaagcagatcgacgccctgaccaagaagcggaagaaggccgaggagtgggaggaggtggagatcgacgaaacgatcgccaacctcaagatccagatcgagcagctgtacaccctgcccaacaagaacgggaacagcatcccgatcaagaaggtgcgggtgtaccagcccaccgtgaccaacccgctgaacatcaagacccagcgggacaagagcaccaagtccaagaaggagtacaaggagcactaccacgtggccaacgacggcaactacctgatggccatctacgagggcaaggacgagaacggcaagaccgtgcgggacttcgagctggtgaacaacctgaacgccggcgagtacttcaagctgagcgtgcagaaggacctggagggccaggacctcggcaagtacgagggcctgatccccaagtccaagctcaccaagaagatccagatccccctgaaggccgtgatcaacgtgggcacgatggtgatcctgtgggagaacacccccgacgaggtgtgggacctgagcatcgaggagatcaagaagcggctgttcaaggtgaacggcctgagcatcctgaccatccagaagaagtacaactacggccggatctacctgaagatccacaacgactcccaccccagcaccgagctgaaggagcacagcggggagtacaagtccaccgacgacatcttcccgttccgcatgatcctgcacaaccagctgaacgccctgatcgagggcatcgacttcaccatcaccccgctgggcaagctgatcaagatcgagcacaagcggcccgccgccaccaagaaggccggccaggccaagaagaagaaggactacaaggacgacgacgacaagtaa

SEQ ID NO: 644 - DNA, 3318 bp, synthetic construct
  source 1..3318: mol_type = other DNA
atggccccaaagaagaagcggaaagtcatgggctacatcctggggctggacatcggcaccaactccatcgggtgggccatcctgcgggaccggtccatcgtggacctggggatccggatcttccccgtgggggtgaaggaggacctctacaacaagtccggcaccgaggagagcaagagctccgcccgccggaccgcccggggcatccggcggctgtacgaccggtacaagctgcggcggcggcagctgaagaagctgctgctgtccctggacatgatgcccccggagatcctgtccctgtccagccgggagctgtacgccctgcgggcccagagcctggacgagcggatcaccctccaggagctgggccgcatcatcctgctgctgaaccagcggcggggcttcaagtccaacaagaaggagaagggcagctccgaccagaagaaggagctggagggcatcaagctccagatggaggagctggagatgaagatcgccagctccgggtgccggaccgtgggggagtacttctactccctgttcacggaccagtccagccagcagaactggcacaacacggacgagcccgtggagcggatccggaagcggttcgtgttccgcaagacctacgagaaggagttcgacctgatctggtccaagcagaaggagtactaccccgacgtcctgaccgagggcaactacaagaagctgaaggagaactgcctgtactaccagcggcccctgaagtcccagaagcacctggtgggcaagtgccgcttcgagccccagaagcgggtggcccccaagtccagcttcgacttccaggagttccgcatctggcagttcatcaacaacctgcggatcaccgggggcaaccggttccgggagtccctgaccctggaggagaagctgcgggccgccggcgtgctgcaggaccagcaggagatgagcgtggccaagctcaagaccgagctgaacctgcccaagtcctacagcttccagaaggacctgccccagaagatcaagggcaacaccaccaacgccaagctgcagaacgccctgggcaaggagaacttcgactccctgtccggggacgtgaagtacaagctgtggcacacgctgtacttcgccaacgacgaggagtggctggagaagtacagccagaaggacctgaagctgacccccgagcagaccaaggagtacatgaagatcaacctggaggaggagtacggcaacctgtccgtgaaggccatccggaagatcctgcccttcatgaaggccggcttcgactacgcccaggcctgcgaggaggccggctaccaccactccttcgacgaggtggaggacggcaaggagcgggagctgaaggacaagatcgagcggaacaaggaggacgacctccggaacccgctcgtgcagcaggccgtggccgagacaatccggctggtgaacgagatcatcaaggagtacggcaagcccgaggccgtgcgggtggagttcgcccgccagctcaagtggacccgcgagcggcgggagaagtacaagtcccagaacgacgagaaggagcggacccgggacacctaccgggagttcctgaagcacaagctccagatggagaacgtgtccaagagcgacctgctgaagttcgagctgtggctggagatggagttctccgagacagagctcgagaagatcaccaggtccatcgacatgaccgagttccgcaagttcgccaagcacgtgaagcccggcgacaagcagaagtacgagctgtggctggagtgcgggcggatcagcccgtactccggcaaggtgatcaacctgcacgccctgttctcccccgccatcgaggtggagcacatcctgcccttctcccggagcctggacgacagcttcgggaacaagaccctgtgcgagcgggagatcaacgccgccaagggcaaccgcacccccttcgagtacctgggggagaacccctacgagtggcagaagttcctggaccgggtcaagagcttctccgagggcaagcaggccaagttctccgccaaggacctgcccgccgacttcatcagccagcagctgaacaacaccgcctacatcgccaagcaggcccggaagaagctcaagaccgtgtgccccgacgtgaccgtcaccaacgggcaggccaccagcttcctgcggcggctgtgggggctgaacaccatcctgaaccccaagggggagaacgtgaagtcccggcacgaccaccggcaccacgccgtggacgccctggtgatcgcctccaccacccccgccgacatcaagatgctgagcgactacgccaagttcgacgccagcgggaagctgaccctgcgggacgcccccacccccttcctggagttccgggagcaggccaaggagctgctgtccaccgtgttcatcagctacaagaacaagaagcggctgatcaccaccaagaagaacaagtacatccacagccggaaggactgctccaccgccaacatctccatccggggccccctgcacgaggaaaccttcttcggcaagatctccaacccccacaccgggaaggaggagttcgtgatccggaagcccctggtgagcatcgagacagagaagcacatcgccaagatcatcgacccggccatcaaggccctggtgatcaagcacgtgcaggagcacgggggcaacatcaagtccgccatggccatcgacctgttcatgaccagcaagagcgggaagaagatccccgtgaagaaggtgcggatgcaggagagcagcgaggacctgatccagctgcgccccaacgagaacaacaagctgttcgtgtcctccggctccaactacctgatggccatctacgagaaggagggcaagcgcaccttcgagaacgtgagcttctacgaggccgtgcagcggcggctgaagggcctgcccatcttccccatcgagaaggacggcaaggccttcctgctgtcgctgacccagaaggatctggtggtggtctacgagaacgaccccgacgagatcgactgggagaacaaggcccagctgttcgagagcctgtacctggtgcggaagttcgaccgcaacgggaacatctgcttcgccaagcacaacctctccaacgtgaaccccgaccaccccaaggactacccctccgggtgggtgctgaagaagtccagcaaccggctgcgcgccatcaaggtgcggatcagcatcaccggcaagctgatccgcatcaagcggcccgccgccaccaagaaggccggccaggccaagaagaagaaggactacaaggacgacgacgacaagtaa

SEQ ID NO: 645 - DNA, 3255 bp, synthetic construct
  source 1..3255: mol_type = other DNA
atggccccaaagaagaagcggaaagtcatggagaacatcgccatctccgaggacctggtgctgggcctggacctgggggtgagctccatcggctgggtggtgctcgacaagaagaacaagaacgagttcacccggatcgtggactccggcgtgcggatcttcgaggccgggatggacggcgacatctccagcggcaaggccgacagccacgccctggcccgccgcaacgcccggcagatccgccgccagacccagcgccgggcccggcggtcccggaaggtgatgtaccggctgcaggagatgcggctgctgtccgaggggacagtgtccgacatcatcccgcccctggacaaggagctggccgccaagtaccaggacgtgttcgacggctccaaggagctgaccctgagcaacatcctgccctactggctgcggaagcgggccctggacgagaagctgtccccctacgagctggggcgggtgttctaccacctgtcccagcggcgcggcttcctgtccaaccgcaagtccgccgcccgggacaacgaggagctgggcaccgtgaaggagggcatcaacaacctgtggaaggagatcgaggagactcggtcccgcaccctgggggagtacttcaccaccctgaacccccacgagcagcggatccgccagcggtggacccaccgggacatgtaccggcaggagttcgacgccatctgggcctcccagaaggggtaccacgactgcctgacccaggagacatacaagaccctctcccacgccctgttccaccagcggcccctgaagtccgccaagcacctggtgggcaagtgcagcctggagaagtccagccggcgggccccctacgcctccctggaggcccaggagttccgcctgatctctatggtgaacaactgcaccgtgatcacccccgacggggagatccggcccttcaccgacgaggagcggaacacgctcctcgagcacctgcggaccgagggcgacatcaccttcaacaacgccaagaagctgctgggcttcaaggcccgcagcacccacttcaacctggaggagggcggcgagactcggttcgtggggaaccgggtcaacgcctccctgaagggcatcttcggggacaagtggctggacttcgacaaccagaagaagaacctgatcatcaacgacctgcgctgcgtgcggcagagcctgtgcctgttcgagcgcgggatcaacgtgtacggcctggacaaggagcaggccgagaagttcgccgagctggagctggaggacagctactgcaacctgtcccggaaggccatcaagaaggtgctgcccctgatgcagaccgagaagatgacctacgccgaggccaggtgcaagatctacggcgagagcctccaggccggcgagcccctgaacatcatccggcccgtgaacaagttctccgacatccggaaccccgtggtgtcccgcgtgctgaccgagacacgcaaggtggtgaacaacatcgtgcggaagcacgggaagcccggccggatccggatcgagctggcccgggacatgaagaactccgccagccagcggcaggccatcgccaagcggaaccgggccaacgagggcaaccgcaagaagatcgccgaccgcatcatcgccaacaccaacatcaagaacccccggcgggacgacatcctgaaggtccagctggcggacgagtgcgactggatctgcccctacaccgggaagcagatgtgctggaacagcctgttcggctccagccccagcttcgacatcgagcacatcatccccttctcccggagcctggacgacagcttcgccaacaagaccctgtgcgactcccactacaaccgcaacatcaagaagaaccgcgggcccggggagtacgtgcagcccgggtccgaccagtgggacaccatcatgggggccgtgagccggttctccggcgacaagaaggtgaccgccgagaagctgcggcggttccagctgaccaccaagcacatcgaggagctgaccgaggagttcccctccaaccagctcaacgacacccggtacgccagccggctcgcctgcgagtacctgggcgagctgtacggcggccaggtggacgccgaggggatccggcgcatccaggccgccaaggggaacatcacctactacctgcgggaggcctggcagctgaaccacatcctgggcgacggcgtgaagaaccgggacgaccaccggcaccacgtggtggacgccctggtggtggccctgatgacccccgccaccatccagcggctgaccaacgccgccgtccagaactacgagcggagcaccaacaagggccggttcaagatgcccaagatgccctgggacaacttctgggaggacgccaagaacgccatcgacgacatcatcgtgtcccaccgggtgaaccacaaggtgaacgggcccctgcaccaggagtccaacttcgcccccgtgtccgtgatcgagaacggcaaggtggtgaacgagacacacatccggcgggagctggccaagctgaagatcaacgaggtgaacaagatcgtgtcctccgtggtgcgctccgccgtgaaggccaagctggtggagctggacaccgacgaccccgccaaggccttcagcgaccccgccaaccacccctgcatgaaggccaaggacgggcggatgatccccatccacaaggcccggatcaagatctccgcctccccggtgaagatcgggcaggaccgccgggagcggtactgcaccaccgggtccaaccaccacatggagatcttcgccatcctggacgaccagggcaaggagatcaagtgggacgccgccgtggtgtccaccctggaggccatgcggcggaaggccaagcaccagcccatcgtgaaccgcgaccacgggccctccaccaagttcaagttctccatcagccccggcgacaccttctgcctgaacaagcccaagttcaacatgcccaagctggtgcacatccgctgcgtgcccgagagccagcagatcatgttctgcgctctcaacgacgcccggaagcaggccgacatcaagaaggccaaggagtggttcagcagcaaggtgcgccccttcaaggagctggagcccgagaaggtgatcatcagccccctggggcgggtgtggaccgccaacgacaagcggcccgccgccaccaagaaggccggccaggccaagaagaagaaggactacaaggacgacgacgacaagtaa

SEQ ID NO: 646 - DNA, 3276 bp, synthetic construct
  source 1..3276: mol_type = other DNA
atggccccaaagaagaagcggaaagtcatgaccaagtccaactggaacaagtaccggctgggcatcgacctgggcaccagctccatcggctgggccgccatctccctggacgagcgggacaacccctgcgccgtcctggacatgggggtccggatcttccccgatgggcggaagcccacggacgagtccagcaaggccgtggaccggcggatcgcccggggccagcggcgccggcgcgaccgctacctgaagcggcgcgccgagctgatgcaggccctggtggactacaagctcatgccgctggacaagaacagccgcaaggagctggagaagctggacccctacgccctccgggcctgcgccctggacagccccctgaagccctacgagctgggccggaccctgttccacctggaccagcggcggggcttcaagtccaaccgcaaggccgggaacgaggacgagtccgaggagaagaagctgtccgccgccatcggcgagatgcggcggcgggtggaggagtccggcgcccggaccctgggcgagttcctggcccggcggcacgagcgccgggaaaccgtgcgggcccggaccgacctggggatctaccccgaccgggccatgtacgagtccgagttcgacgccatccgggccgcccagaagccgcaccagcggctgcggcccgagcagtgggaccggctgcgggacatcatcttctaccagcggcccctgcggcccgtggaccccgggctctgcagcttcgagcccggggagaagcgggccgcccgggccctgcccctgttccaggagttccgcatgctgcaggagctcaacaacctgaccctgcaggtgggggccgagcccgaccggcccctggacgagcgggagcgggagcgggccctgatccggctccgctccggcaaggggatcgacctgcagcggcccaccaagagcctggacctgccctccggggccaccttcaacctgtcccgcttcggccggaaggccgtgaagggggacgagacaaccttccggctggtcaaggacgagctgttcggcgtgcggtggatcggcctgtccctgcagctgcgcaacgagatcgtgcgcttcctgctggagacagaggaccccgacgacgtgcgccggaaggccgccggcgagtggggcctgaacgaggcctccgccaacgccgtggccaacgccagcctggcccccggctacggcaacctgagcgacaaggccatccagaagctgctgccccacctgcagcaggggctggtgtacagcgacgccgtgatcgccgccggctacacccaccactccgacttccggaacgccgaggcccacgaccggctgccgtactacggcaaggtgctggtgcgggacgccgtgggggccgaccccgagaagaaccccgagaaggacggcgagcccgcccggtacggccgcatcgggaaccccaccgtgcacatcgggctgaaccagctgcggcgggtggtgaaccgcctgatcgacgcctacgggaagccccaggacatcgtggtggagctggcccgggacctgaagatgaacctggtgcagaagcagcagctgcggcggcagcagcaggccgggttccggcggaacgaggacttcaaggagatgctgaagtccgccggcatccccgtgacccagcacaccctgcacaagctgcagctgtgggaggagcaggggccccctcaggcccgggtgtgccccttcagcggggcccacctgagcttcgctatggtcgtggtgagcaaccagaccgaggtggagcacatcctgccctggtcccggaccctggacgacagccccgccaacaaggtggtgtgcaccatcaaggccaaccgggacaaggacaaccgggccccgcacgaggccttctcccacagcccgcccggctacgactaccaggccatcctggaccgggccgccaacctgcccggcaacaagcggtggcggttccagcccgacgccatggagcggttcgaggacgaggccggcttcctggaccggcagctgaacgaaaccagctacctgtccaggaccgcccgggcctacctcgcctacctgtacgacgagaagggcgagggccgggtccgggtgcgggccgcccccggccggctgacctacctgctgcgccgggggtggggcctggagggcatgctgcgcgtgaccgagacaggcgagatcgtgcgcaagcagcgcgacgaccaccgccaccacgccatcgacgccttcgtggtggccaacaccacccccgccctgctgcggcggttcgcccaggccgccagcagcaagcacgggaacgtggtggagcggctggccgccctgacccctcccccgtgggaggggttcgacagggaccacctgcgggccttcctgaaccgcctggtggtgtcccacaagcccgaccacgggaagcggggcgtgatgggcaagaccaccggccagctgcacaacgagacagcctacgggctgatcgagctgtccgccgacggccccagcaaggtggtcacccgcaaggacgtgagcgccttcaagcggcgctccgacctggactccgtgcgggaccccgccctgcggcggtccctgcaggagccctgggacaaggccggctccaagccggccgagttcgcccagcaggccgccaacgagggcgtcctgctgaacggccgccggcagcgggtgcggcgggtgcgggtggtggagaacctgcgggtggtgcccgtgcgggacagcgagggccggccctacaagggctacaagtccgacaacaacgagttcgccgaggtgtggcggatgcgggacggccggtggcggatcgtggtggtgcccaccttccacgccaaccagcccgacttcgacatcgagaagttccggccctcctaccggggccggatcgaccccaccgccaagcgcctgatgcgcctgcagaagaacgacatgggggccctgggcgagggccccagccggcgcatcgtgaaggtgcggcaggtgtgggccggcaccgtgatcctggacgaccacaacgaggccgacgtggacgcccgggagcggcgcggcgaggtggaccgcaacaagaacagctacagcgccaagaagctgtacgagcgggacttccggaaggtggggatcgacgagatcgggcgggtgctggaccccggcccgcccaagcccaagcggcccgccgccaccaagaaggccggccaggccaagaagaagaaggactacaaggacgacgacgacaagtaa

SEQ ID NO: 647 - DNA, 3324 bp, synthetic construct
  source 1..3324: mol_type = other DNA
atggccccaaagaagaagcggaaagtcatgcggaagtaccggctgggcctggacctgggcaccaacagcatcggctggtgcgccgtgcagctggacttcgagggccggcccagcgacgtgctggacgccggcgtccggatcgtgagccccaacgaggaggccggccgggacccccagtccaagacgtcgctggccgccacccggcggcagttccggggccagcgccggcgccggaaccggttcacccgccgccgggaccggctgctggacctgctggtccgcgccggcctgatgccccaggacgcccaggcccggaaggccctggagcgcctggacccctacttcctgcggcaggaggccctggaccgggtgctggagcccggcgagatcggccgggccctgttccacctgaaccagcggcgggggttcaagagcaacaggatcgccgacagcggcgacgacgagcgcagcgccatgaagctggccgtcaaggccctcgaggaccggctggagtccgagggcgcccggaccctgggcgagttcctcgcccggcggcacgggcgcgaccggtacggccgccgggacaagggggccgccgcccggccggtgcggttccgcgccgacaccgacggcgggaaggccctgtacgacctgtaccccacccgctctatggtggagcaggagatcgacgccatctggcacgagcagaagaagcaccacccccggctgctgaccgacgagctgctggggaagatcaagcggatcgtgatcgagcagcggcccctgaaggaccccatcgcgggcaactgctccctgttccccagcgagaagcgggcccccaaggcccacccgctgtaccagcggttccggatcatgcaggacgcctgccagctgcgcgtgatccggcgggggcaggccgagcggcccctgcgggtgagcgagttcgagctgatcgtgggcgtcctgctgaagcggagcagccggatcgtggagttcgagaagctgcggcgggagctgaagctgcccgacgacgcccggctgaactacgagcggagcgggcggaagggcttccagtgcgacgagacagcccgcgtgctggccgccaagcggaccttcggcgccgcctggcggcggctcgacctggaccgccaggtcgagatcgtcgagcggctgctggaggaccaggacgaggtggccctgtgcgactggctgcaggccgagctggagctggacgccgccagcgccgagcacgtgtccggcatccggctgccccagggccacggccggttctccatcgccgccctgcggcggctggtggagacaatgggccgggagtctcgggaggcccacgaccccgccaccggggaggtgtacaggcgccccctgacctacgacgaggccatcgagtgcctgggctaccaccacagcgaccggcggcccggcaagctgcacgagcggctgccctactacggcaaggtgctggaggagcacgtgatccagtggcccaacgcccccaagggcagccacgaggccatcggccgggtcagcaaccccaccgtccacatcggcctgaaccagctgcggctggtggtgaacgccctgatcgacgagtacgggcccccggaggacatcgccgtcgagctgggccgggagctgaagctcaacaaggagcggaaggagcgcctggaccggcagaaccgcgagaacgagcggaagaacaacgagttccgggacaccctgtccgagctggggctggccgacacctacgacaaccgcatgcggctgcggctgtaccacgacctgcccgccctcagccggatctgcgtgtactccgggcggcccatcagcgtgtcgatgctgttcagcggggagatcgagatcgaccacatcctgccctacagccagaccctggacgacggcttcgccaacaaggtgctgtgcctgcggaaggtgaaccgcaagaagcggaaccgcgcccccgagtccgtgtggaccgggaaggagctggccgacatctgcgagcgggccgagagcctgttccccaagaaggcctggcggttcgcccccggggccatgcagcggttcgaggacgagggcggcttcctggcccggcagctgaccgacacccagcacctgtcccggctggccaaggcctacctggagaacgtgtgccggagcgtgcgcgtgttccccgggcggctcaccgccatgctgcgggcccggtggggcctggacgggctgctgtccgaccacaaccgcaagaaccgcaacgatcaccggcaccacgccatcgacgccttcgtgatcgcctgcaccgacctgggcctgctgaaccgcatcgccaacgcgagcgggaaggccgaggagctcaacctggagcggctgttccccaaggacgccttccccatccccttcgaggggtaccacaaggccctggacgcccggctgcagatgctggtggtgagccaccggcccgaccacgggctgcggccgggcgccgggaacgacgtgcacatgaccagcgggcagctgctggacggcatggccttcgggcaggtggacgaggtcgtcgatggcaagcggtacaacctggtgcggcggcggcccctgcgggagctgaccgcccccatgatcctgcggatccgggaccacggcctccgcaacgagctggcgatggtggccaaggacgccaagctgtccggccgccgcctggaggacgtgctcctggagttcgggaccgcccgggacatccgcagcgtgcgcgtgctggagacaaaggccagcgtgcgcgaggtgcggcacatccggagcctggacggcttcgggttccggaaggcctacgagacagccgacaaccactccatcgagatctaccggctgcccaacggcaagtggcagggcgagggggtgaccgtgtacgacgccaaccgccccggccacgagcccaactggcgcaagacctacccggacgcccggctggtcatgcgcgtgcaccggggcgacttcatcgaggccgacctgggcgaggggcgccgggtgtaccgcgtggtgcagctgcggcccagcgccaacaaggtgttcctggcccagcacaacgaggccggcagcctgcagaagcggcacaagtcctccaccgaggaggaccccttccgcttcatgatgcccgtgtactccaccctcaagaccgccaaggcccggcgggtgcgggtggaccccatcgggcgggtgcaccgggtcaaggcccgccggaagcggcccgccgccaccaagaaggccggccaggccaagaagaagaaggactacaaggacgacgacgacaagtaa

SEQ ID NO: 648 - DNA, 3840 bp, synthetic construct
  source 1..3840: mol_type = other DNA
atggccccaaagaagaagcggaaagtcatgaagaacaagaacaagaacccctacatcctgggcctggacgtggggtccaactccatcggctgggccgtggtggactgcatcaaggaggagggcgaccacaagggcatctacgccggctacaagcccacctccctccgggccctgaactcccggatcttcctggagatggtggaggccaagacccgggtgcccaagaaccagaagcgccgggagaagcggggcgcccggaagcggcgcagcttctacaagcggcgccgcgagaagctggtgcggatcctgatcgacaagcggctgctgccggaggactaccggcagtgccccgaaaagaccctgaaccagatcgaccgccgctacggcgagcggaaggtggggaagcactggagcaagacctggtccgtgaccgagaaggcccactgctccccctacgccatgcggaacttcgccctcgaggagaacctggagcccttcgagttcggccggctgctgctgcacctgcagcggcggcgcggctacttctccaaccgcggcgccaagtacatcgagctgatcaagcacctgtccctggactcccccgaggacgggcaggagtccatgtccgtggaggagaagaaggagacaggcaaggtgctgcaggccatcgagaagctgcacgaggagctcgagggctccaccctggggcagttcatctggcagaagtcccagaagcaccagaagccgccccaccgcatcaccctgttcgagttcgagaagtcccggacccacaagtccgagactcggatcgagcggctgcagttcagggccaagcgggagatgtacgagaaggagttcgacgccatctgggagaagcagtccaacttccacgacctgtccggccagaagcacgagatcaagcacgccaccttctaccagcggcccctgcagctgcagaagaacgccgtggggaactgcaacatctacccccacaagaagcggagcgccctgatgcggctggagttccaggagttccgcaccctgcagatgatcaacaacctgaaggtggacgggaaccccctgtccggcgagcagcgcaacaagctgtgggacgccgccaacgaccccgacaagctgaacgagtccgggcggatcccctggaaggaggtggcccggatcctggagatcaagcgggccaccctgaactacgagacaaacgaggacggggccggcaagaccggcctgatcggcaacaagaccgccaaggccatctccgccagcatcggcgccaacaagtggcgcgagctggggaaggacaagcagatcaagctggtggaggacctgcagaccatccacaacaagaaggacctgtactaccggctggtgacccactggaagttcgccccctaccagcccggggacaacaagaaggagaagggggccctgggcctgacgatggacgaggagctggaggacggctacgggaagcactccctgaaggccatcaacgagctcctgccccacctgcgggacggcctggactactacaaggccgtcgagaagatcgggcaccgggagtccatcacccccaaccagcgcaagaccgaggacgactacgtgctgtccgtggccgacgtgcccaacatcgccaaccccgtggtgcagaaggccctgtacgagatgcggcgggtggtgaactccatcgtcaagcggtacgggaagcccgtgatcatccggatggagatggcccgggagatgaagtccagcaagaagcaccgggccgagatcgcctcccagcagaagaagaaccgggaggacaacgagaaggccgagagcgagatcctggactactggcagaacgggaagaacccccacatcgagctggagcagctgcggaacaaccgggcccgggtgagccggaacgaccgctccaagtacaagatgtggaagtacgagcaggacgagaagtgcccctactgccagcggcccatcgggcccaaccagctgttcagcggggacgccgagatcgagcacatcctgccgtacaccgggttccggcagaactacctgaacaccctggtgagctgccgggcctgcaaccagcggaaggggcagcagaccccctacgaggcctgggggtccgaccccgaccagtgggagcggatcgaggagttcgccaagggcaagtacgtgcgggagctgtacggcaagcagcgccggatcctggagaagaagcacagccccgagactgtggacgacttcgtggagcggcagctgaacgacacccggtacatcgccaccgccagcaagacgatgctgcagaagtacggggtgcccgtggacgtgaacacgggcatggccaccaacgagctgcggcaccagttcgggctgaacaacatcctgccccacgagcccgacaccgacgcctacatccccaccggggacaaggtggacaccgccaccggggagatcctgcagttctccgccgacaaggccaagaagtcccggcaggatcaccggcaccacgccatcgacgccttcgtggtggccatgaccgaccgcgccatgctgaaggcgatggtcgacgcccaccagatcgagcaggacaacaagaaccccagccgccagaaaacccgggaggaccgcatccgggagcggcggctggtcctgcccgagagctgggaggagagcgaggagctgcactccgtgctgaaggggaagctggtgaccaccgtcgccagccatatggtgaagcgcaaggtgtggggcgccctgcacgaggagactctgtacggcaagagctcctacgaccagagcctcgacatcgagggcatgaccaccgccatcctgaagcgggtgcagcgggtggcggaggccgacacctccaacaccgactggatcgccgacgaggagctgcggtccatgctcgccgactggagcaaggagatgctggagaagaagcccagcgaccgggtgctgccctactggaagggcaaggagctgaagaagttcgactaccagtgccccaccgtgaccgtgcggcgcaagctgatggacgagctgggcctgctgtccgggctcaaggaggagtggaagcccggggccaagacctgggtggccgacaagtccatccacgacgccctgttcaagtggctggaggagcacgggctgaccggcaagaaggggaaggagatcaaggaggtgctgaccaaggtgcctccccgggtgctgaacaagaagggcgagcccagcacccccatcctgaacgtgcggatcgcccgcgccatgaccgactcctacatcaagatcgccaactcctacgtgcagcccggctccaaccaccacctggtgatctaccacaacgggctggagggcaagaaccgggagcggcgggtggagatggtgacgatgctggaggcggccaagcgggccaagtccaacaagcccgtgatcgaccgcaacccgcccctggagtgggacggggagtggcactacgagctggacctgtgcgtgaacgatatggtgcggtgcgaggacctcgacatcttcgagaacgacaacttcgcccccgagcaccgcgccagcccctggttccgcgtgcagacgatgaacagcggcggccggaacaaggtggacctgcggctgcgccaccactccgtgagcggcaccgactccaactgggggctgtggcggatccgcagcctgaagaacgtgcggtgccgcaaggagcagatcggcaacctggggctgctggtggacgacagcaagcggcccgccgccaccaagaaggccggccaggccaagaagaagaaggactacaaggacgacgacgacaagtaa

SEQ ID NO: 649 - DNA, 5109 bp, synthetic construct
  source 1..5109: mol_type = other DNA
atggccccaaagaagaagcggaaagtcatgcccgagaagcccatcatctcccccatcagcatcgacctgggggcgaagaacaccggcgtgtacttcgcccactaccaggagggctcctccatcgagaacatcgagaaggagggcaaggtgtacctcctggagaaggacaagtacaccctgctgatggagaaccgcaccgccgcccggcaccagcgccgggggtacgaccggtgccagatggtgaagcggctgttcaagctgatctgggagaagcacttccacctggagtggaacaaggacgtgcagcaggccacctccttcctgctgaaccggcggggcttcaccttcctgaccgaggagtacgacaccgagaagctgagccggttccccaaggaggcctacaagctgctccccgacgagctgaaggagaacgtggcctgcaccgacgtggagtacgacttcagcgtgaagctgaaggagtggaccaacgagggggaaaccaaggtgaaggagatcttcgaggccctgatcaaggagcccaagcggatcaccaagcgccaggtgctgatcgggcgcaccaagaagctgcgggagtactgcgagatccgcaagaagcgggagaagatctccgacgagaagcggaaggtgctctcccgcctgtccaagtggatctggaacgagtggcagcagaacggggtgcagggcctggacgagaacttcgtggccaagaacaagtccgacgactccgaggtggagtggaccttccccggccacttcgacctgatcatctacctgaacaaccagtcccgggacatcgcctgccagatcctggacagcctgcccgggaccgcctccgaggagaaggagctcaagacctgcgtgtggaacttcaagaccgagaagttcgacctggagaaggccgggctgggcttcgaccagcccgacaactccggcgacagcgccagccagggccagcagaaggagtggctcaagacccacctgcaccacctggccttcgccctgcacaagaccctgcacgagctggagtccggcgggcggcaccggtccaagtacttcgaggaggtgaagaaggtgctggagaaccccaaccacacccacgactacctgaagaacttctgccggaagctgcagtccgggtgctaccccgacctggacaaggtgaacttcgccaacctgatcgggcacatcagcaacctggagctgaagcccctgcggaagtacttcaacgacaagtcccaccgcaactccgactactgggacgagacacggctgaacgagctgttcgaccggtggatcctgcgggagtggcgggtggacaccgggaaggacaaggagaaggccgacgggaagcggggcgactacaagaacctgcaggagtgctggaacgactacaagaaaaccaaccccaacaccgtgatcgacttctggctcaagaccaaccccttcttcaccatccctccctaccaggacaacaacaaccggcggcccccgaagtgccagtccctgatcctgaaccccgagttcctgaaccgcaagtaccccgagtggcaggactggctcggggagctgcggaagctgcccaccgtgggcgagtacctcgggaacttcgtgtgccagctgcggtccctgaagggcggcggcaagagcacctacttctccgacaaggagacagagcccaagaagaagaacggcaagcccaagagccccaaggagctcaaggccggcaaccaggagcgccggcccctggaggccctggacgcccggatcctgcagttcatcttcgaccgggtcaaggccgacgaccccctgaagctgaacgagatctactcccaggccaagaagtggcggcaggagcagtccaccgagaaggagaagcaggacgccaagtgcaagctggagatcgccatcggcgagtccggcctgcccaacgggctcaagaccaaccgggactacgacaacaaggggctgctgcaggaaaagaccttcctgcacctggtgtgcaagtactacaagcagcggcagcgggccaaggacggccggctgttcatccaccccgagtaccggtacgtgaagggccgggggtacgagaacaccggccgcttcgacgaccgcaactgcctgctgacctactgcaaccacaagccccggcagaagaagtaccagtccttccacgacatcgccggggtgttccaggtcagcctggaggagctgaaggagatcatcggctccaccgacgacagcgaggtgatcaagtggctgaagtccttcaaggccgagcggagcagcctggagggcatctgcgagcgggccgccaaggcccagaaggagcaccggggcttcctgaaggagaacatgcgcaaggccgtgtccgcccacagccccggcgccgacgaccgggagctgcggaacctggaccagaacatcaaggccctgagccacgagctggccaagagcctgttcggccagcgcatccagcaggacgacccccgggcccagaagttctgcagcgtgttcagcttcgcccagatccacaacatcgccttcaaggaccggtccggcaacagcaacacctgcgccgtgtgcggggccgacaacgcccaccgcatgcagatgaccgagaacaccgggtccaaggagggcagcgccaaggcccagcgcctgcccgccatccccacccggctgatcgacggcgccgtgatgcggatggcccgcatcaccggcggcgcgatcgccgaggagaagtggaagaagatcgagaagtccctgaagcaggagaagaaggtgcgggtgcccatcatcaccgagagcaaccggttcgagttcgagccgagcctcaaggagatcaagggcaagtccctgaaggacaccgacaagctgtcccgggagaaggggcaggagcagctggccaccaacaaggacgagcggatcaaggaggccagcctgggcatctgcccctacacgggcaagaacctgcccgagaaccggggcgacaaggaccacatcatcccccggtcctccaagcgggggaccctgaacgacgaggccaacctgatctgggcctccgacaccgggaacaagaagatcaagaaggacaaggagttcagcctgcgggacctgaagaaggcctacaagcagaagcagttcggcgccaaggacgaccaggagatcaagcagtggatcatcgagcagatcggggacggggagggcgagaacttctccttcgggaagtaccgctccttcaccaacctgaaccaggaccagcagaaggccttccggcacgccctgttcctgaagggcgagcccctgcgggagaagatcatcaacgccatcaacaaccgcacccggatgctggtgaacggcacccagcggtacttcgccgaggccatcgccaactccctgaacaagaaggcccgcaccatcggcaagcagagcctgctgtccttcgacttcttcggggtggaggcccagtccaacacccggggcgacggcatcaaggacctgcggaacgagtacgagaaaaccgggctgatcgggcaggagtacgccaagaaggagggccagaagcagaagccctacagccacctgatcgacgcccagctggccttcgccatcaccgcctgcgcccacaagaacgccggcgggctgcggctgaccatctgcgactccctgaacctgtggcccctggacaaggacaccggggagatcttcgaaaagaccatcttcgggtccatccaggtgaagcccgacgagatgcagcccctggaggagctgcagcggcggaaggtgtacaccgtggaaacccaccaccgcaagatcatcaccgagaaccgcaagcccagcatcaactaccagatccaccgggactccatctgcaaggagtccttcttccccatcctgaagttcaaggatgacaagtacaagaagggcttcgatcagagcaactgcgccgacttcaaggccgaccagttcagcctgctgctggagaactccttcgtgcggcagacctccagcaacgcccactacgaggtgtggaacatcctgaagaaggactgccagcagttcctgatgaagatcgggagcgtgggcgccaactcccaggagcgcaagatcgccaagatcctggacaacctgacctaccagaccatcaagaagcccctggagaaggtgctggacaccagccggctgaagaacaagccgccccagaccgtgggcgacgccctggcctgctggcccgagtgcatcaaggagaaggacttccacaaggactccgtgatcctgcccgcctactacgagtggatgaagctgcaccggcacctgcaggaggccgacaaggagaaaaccttctacgagttcgtgaagaactgctccctgttcaagaacacccagagcacctccgaccacaacaaggtgcggaaggtgttctccctgccggtgcagatcagcatcggcaacatccggctgcagcggaagtcctgggacaagacccaggtgatccagatcgtggccgaggagtccctggccaagtacggctacgacggcaaggggcggccccacaccatcatctccaagaactccgtgcccaagaagcactacaccgggatccccgacaactggaacctggagcccctggagtggaagcgggtgcccgtggagaagatcaccctgcggacccccgacatcgaggtgaaggacgccaagatcaagaacaaggacgccgggcggtgcatggcccggctgaaggtgagctccatcaaggacctgagcctgccccaggacaagcgggactggaagggcaaggtgatctgccacgagagcgaggaggagatgaagaaggcccaggaccgggacaagaaggacaaccaccactgcctgtcctcccagttcaagtggttcgacacccccttcaccctgcagaacgaccggcgggaggtggagatcgaaacctcccccgacgggaaggtgatcaccttcaccatctccaagtccagcaaggtcaagagctggctgagcgccaagcggcccgccgccaccaagaaggccggccaggccaagaagaagaaggactacaaggacgacgacgacaagtaa

SEQ ID NO: 650 - DNA, 4182 bp, synthetic construct
  source 1..4182: mol_type = other DNA
atggccccaaagaagaagcggaaagtcatgaacatccgcaaggtggacaactacgccgtgggcctggacatcggcaccaacagcgtgggctgggccgtggtggacgacaagggcgagctgctcaagttcaagggcaagaacacctggggcagccgcctgttcgactccgccgacaccgcggcccggacccgcgcctaccgcacccagcggcggcggtacgaccgccggaagtaccgcatcagcctgctgcggaagctgatggaaaccgacgtgttcgccctggacgagaacttctaccaccgcatggagcagagctacctgtggcacgacgaccgggacttcaacgagaagtgggtgctgttcaacgacgccaacttcgacgagaagaagtactacgagacattccggaccatctaccacctgcgggacgccctggtgaacacccacgagaagatggacatccggctgatctacctggccctgcaccacatgatcaagtaccggggcaacttcctgcgggagggcgacctgaccgccgccgactccaacatcaccgccgccctgggcgagttccagatccagctgatggactactgcgagcggtacgggatcgtgtgcgggaccgtggacctggtggccatggccttcgcgatccagtccgggtccgagaagcgggccttccgcgccgagaaggtgcagagcgccctgggcttcaccggcgagtggaagaacatcggcaagcagctgagccgggccatgttcggctacgaggtgaactacgcctccttcttcgaggtggaggggaccgaggccaagttcgccctggacgccgaggagaaggtggagaagttcgtggacgaggtgctccccgaggacgacgcccccttcttcgagtccctgcggagcatcttcaacgcctacctgctggccgggatcctgaaggacatcccggagggcaagaccatctcctacgggatggtgggcaagtacgagcagcacaagaacgacctggacaccctcaagaccctggtgaagaagtacgtgcccgggcggtacgacgaggtgttccgcggggccaagtacgccgacggcgcctacaagcgggagaacgccgagggctacacggcctacatcctgagcgagaagaagctcagcaaggagaacttctacaagtacctgaagtccatcttcgcggacagcgagatgctgcccgaggacgccgacatctgggtgaccgtggaggccgccatggaggaggggaactacctgtccaagctgcggacccgggagaacggcgccatcccccaccagctgcacctggaggagatgcggaagatcatcgagaaccagggcgagtactggcccaccctgcgggagaaccaggagaagatcgaggccatcctgacccacaggatcccctactacgtggggcccctggggaagaacggggtgcccaaccgcaaggagcccttcacctgggccatccgggtggagggccaggaggacaccaaggtgaccccctggaacttcgacaaggtgatcgacaaggacgccagcgccgagctgttcatccggcggatgaccggcaagtgcagctacctgctgggcaaggacgtcatcccccggaacagcctgctgtacagcgagttctgcgtgcggcaggagctgaacgtgtgcaccatcgcgcgcgacggcgagcggccggtgcggttcgactgcgccgacatcgaccgcatcttcaacgaggtgttcaagaagcagaagcgggtgaaggtggacatgctgcgcgactggatccgcaccaacctgggctacatgaacaacgtgatccagggcacccagaaggagggggagttcgccagctccctgacctcctactgcgacttcacccggatcctcgggcacgagcccgagagcatctccgaccgggagatggtggagcagctgatcacctggatcacgatcttcgaggacaagaagatcctgaagcggaagatcgagcagaagtacggcaccctcgggcaggacatcttcgacaaggagcagatcaagcagatctgcaagctgcggtacaccggctggagcaagctgtcccgcgacctgctggagggcctgaaggccgactacaacggccaccgggtgtccatcatcgggatcctgcgggaccccgagggggcccggccccagaacctgatggagatcctggccgacgagcggttcggcttcagcgccctggtggaggccgagaaccaggagtacctgagcaacgtccggggcgcctacgagctggagaacatccccggcagccccgccatcaagcggggcatcaaccagagcctgaagatcgtggacgagatcgtgtccatcgccgggcacacccccaagaagatctgcgtggagatcgcccgcgaggagcagggcaaggggaaggggtcccggaccaagacccggtaccagatgctccagaacgcctacgactccctgagcgacgagctcaaggacgccgacatcagcgacctgagcatcaagctcaaggagcggtccagcgagctggacaaggagaaggtgttcctgtacttcctgcagatgggcaagtgcatgtactgcgggaagtccttcgacatctcctccctgaacgactaccacgtggaccacatcgtgccccagtcgttcatcaaggacgactccctggacaacaaggtgctggtgtgccggcactgcaacgaggagaagctggacacctaccccatccccgagtccatccggcggcggaacctgcggctgtggcaggccatgcagaaggccgacctgatctccaagcggaagctggacaacctgctgcgggaggacctgaacaaccggcagatcgagaagttcatcaaccggcagctggtggagacacggcagatcaccaagcacgtgatcgagctgctcaagacccggtaccccgacgccaccgtggaggccgtgaaggccgagctgacccacgacctgcgggtggagtacgacttccccaagtcccgggtcatcaacgactaccaccacgcccacgacgcctacctggcctgctgcatcagcaggtacgtgtccatccgctacccctcctgggagaaggagctggactacagcgccttcaagaagttcagcggctccgagaaggggcagcggaagggctgcaagggcttcatcgtgggcaccttctccatgaacggcttcgacaaggagacaggcgagatcttccgggacatctgggacgccgacgaggagctgctgaagatgcaccggtgcctgacctacaaggactgcttcatcagccgcaagaccgaggagctgaccggggagttctggaacgccaccgtgtactcccggcgggtggagactgacaaggccatccccctgaagaagaactccgaccccaagaagtacgggtactaccagagccccaacagcgcctactactgcctggtgacctacaccgagacagtgcggtccaaggccaagaccgtggcccggctggtgggggtgccggtgaacgtggcccgccacgtgtccgccagcggcgacctgcgcacctggctggacacccagtacgccgacgtggtgatcatcaagcccaagatcatgaagtaccagaagatcagctgggccgggtgcgagtactacctgaccagcaacagcgagatgatcaacgcccggcagctgtggctgccggagtcctacgtggtggggctggtggagtgcgagcacgccatcaagaagggccagatcgacctggccgtgtacgacgagactttcatcaagatctacgagcgggtgatcgacaccacggccgccgcctacccccggtacagcggcctgctgcagaagatcgagcacgtgtccgacagcttctacagcgccagcatcgaggacaagctgtcccggatcaacgagctgctggggctgctgcacgccaacgccggctgcggcctggtgaccaacgggctgacccccgccgccgggcggatgatgaacatcaactacggcccggccatgctggagggggagatcgagttcatcgacacctccatcaccggcatgtacgagcggcggtacagcctgggggtgaagcggcccgccgccaccaagaaggccggccaggccaagaagaagaaggactacaaggacgacgacgacaagtaa

SEQ ID NO: 651 - DNA, 3555 bp, synthetic construct
  source 1..3555: mol_type = other DNA
atggccccaaagaagaagcggaaagtcatgctgaacaaggtgggggagatccagaagcggagcaagaagccctgcccgatctcccaccccgagttcgagctgttccgggcctaccagttcatcaacaacatcaagtacgggaagcaccccaagctgaccgacgatgagcgggagaaggtgctggccctgatcaacaagaaggacagcaacttcgacttcgccaacatccccaaggagctgaagctgacctacgagaagttcaacttcgaggacaaggccaaggtgcccgccaaccccaccatcaagaagctgcggcccctgttcgacctgaaggtgtgggagaagtcctacgaggagatctggcactgcttctacttctacgaggacaacgacatgctgttcaagaagctgaagaaggacttcgcctacaagaaggacgtggaaaccatcgccaagatcaagctgaaggagggctacagcaacatctccctgaaggccatccggaacatcatgcccttcctgaagaagggctaccagttcgaccgggccgtgatcctgggcgggatcaagaacgccttcgggaagcggtgggactacttcaccgagtaccacgacaagatcgagcgggagatcatcagcatcctgaacgaggacaacaaggacggggaggccatcgacaagatccgggaccacctgtccagccccgtgttcgcctacgggttcaagaaggacgacccctacttcacctacctgtaccaccacagccagaacgtggaggtgagcgacgagctggacgactacctgccgcaggtggagaacctgcggaaccccatcgtccagcagggcgtgaacgagacacgccggctggtgaactccctgctgcggaagtacaagcgcgagtacgggcaggacttccgcttcgagcggatccacgtggagatggggcgggacctgcggaacagcaagaagcagcggcagcaggtgagcatcagcatcgccaacaacgagaagaagaacaacgaggcccgggagcggctggccgagtacggcctgaagtcctcccgggagaacgtgcagaagttcctgatgtacaaggagatcgaggagcggaacggcaaggcccagtgcccctacaccggcaagaccatcgggatcaccgacctgctgggcgagtccaacgccatccagatcgagcacatcatccccctgagcatcagcctcgacgacagcttcgccaacaagaccctgtgcgaggcccacttcaacaacgagaagtccgagaaaaccccctacgagttctactgcatcaaccccgacgtgaagctgtggggcgcctcctcctgggaggaggtggagactcgggccttccggctgctgccctacgccaaggccaagcgcttcaccagcaagcgcaagttcgaggagtccaacttcatcgagcgccagctgaacgacagccggtacatcgccaaaaagacggtggagctgctgtcctgcatctgcaaggacgtgcgggtgatgcccgggcagctgaccgccgagctgcggcacctgtggggcctgaacaacgtgctgagccccatccacgagctgggcaagcacgagatcaacatcgacgagacaaagtccaccccctacttcgtggtgaccgacaagaacggcaacacggtcagcgtgcacaagaagtacaacgacgtgcccgtgaccaaggagagcgagatcctgctgcccgggtacaacgagaagtccaagttcaccaccaagtacttcgacatcaacatcgaggtgcccgagctgtccgacggcaagtactgggccaagctgcaggtgaacagccccatcaaggtgatccccaagtacatcgacaagcccctggccggcgaggaccagatcatcctgaagggccgggtggagaagggcaccttcaagaacgacaccgtcggcagcatcaccaacaaccaggaggacggcaactactgggtggtgttcgacatcgtgaagaagtccttcgtggcccccgagaagaagaaaacccccaaggccaagaagaaccagatcctgctgtacggcaacgtgtacaacggggagttcaagtgctacatctaccggtgcaacaccaacctccccgacggcaagttctggatgctgatcgactacaagcccgagaacatcgagttcatcaaggccgtgaacagcaagcccgagctgaaccacaacgagatctgcatcaacgccaccgccgacgacaacggcctgctggtggccgacgtggaccccgagtacaagatcaaggacagcttcgccagcggcaagtactacatgaccctgaagatcgagaagatccaccccgagctgtaccccatcgagaacgtgctgcccaaggtggagaaggaccagtccatcatcgagggcaacatctgggtggacaagtacaccggggacatcaagttcgaccccaagaagaaccgggacgaccaccggcaccacgccatcgacgccatcaccatcgccctgaccgagcagggcttcctgcagcggctgtccacccacaacgcccagcgcaagtccaagcagcgggagaagctggactccaccgagaagttccccgagccctggatcggcttcttcaacgacgtgaaggagaaggccaagggcatcctgatctcccacaagaaggacaacaagaccctgaccaagaacaggaaggggtacagcgtgcggggccagctgcacaaggagaacgtgttcggcaagcggaaggccccgcaggacaaggtggagtcctaccaccggcgcaccaagatcaccgagctgcagaacgacaagcacgtgggcaaggtggtggacatcaccatcaagaacctgatcgagaagtacctgtccgacaagtgcggcgtgaacatcgagaacaccaaggggtacaagatccccaaggacgccttcttcaagtacggggagtggcagctgtttctgcccaacaagaagggcgaccccgtgcccatcaagaaggtgcggatccgggagtccatcagcaacgccctgcccctcaagagcaacctgaaccagtacgtgaacccccggaacaaccaccacgtgctgatctacagcgactccgaggggaacctgtgcgaggacgtggtgcagttctggaccgtggtggagcggcggctccaggggcagcccatctaccagctgcccgacggcggcaaggagatcatggccaccctggagatcaacgacatgttcctgctggggctgtccaccgacgagttcgagctggtgaagtccgacaacagcttcctgtccaagtacctgtaccgggtgcagaaggtgagcagcagctactacaccttccgctaccacctggccagcaccctgatcaactccaaggaggagttcagcatccgcagcttcaaggcctggcaggacaccaaccccatcaaggtgaagatcaacgagctcggggagatcgaccggttcaagcggcccgccgccaccaagaaggccggccaggccaagaagaagaaggactacaaggacgacgacgacaagtaa

SEQ ID NO: 652 - DNA, 3360 bp, synthetic construct
  source 1..3360: mol_type = other DNA
atggccccaaagaagaagcggaaagtcatgacctggcgcctggggatcgacctgggcaccaacagcctgggctggtgggccttctccgtggagaaggagggcccccggtggcgggtgtccgacagcctggacgggggcgtgtacatcttccccgacgggcgggagcccgccaagaagggccgggtgggcgactccaacgccgtggagcgccgcctggcccggtccctgcgccggaaccgggaccggcgcaagacccggctgcgggccttcatgcgggacctggtggccctggggctgatgcccgtgagccgccaggagcgggacgagctgttccaggcccgcaagggcgaggacagcgaccgctccaacccctaccggctgcgggccgaggccgtggaccggcccctgggcccctacaagctggggcgggccctgttccacctcggcctgcggcgggggttcaagtccaaccggctggagcaggccgacaaggacggcggcaagctgaaggagcgcatggacgagctgcgcaacaccctgaacggcaagaccctgggccagttccagtgggcccgcttccaggtggagcgggagcgccagcagtccggcgagaagcccagcggcatccgcttccggggcgagggggagttctaccccgaccgggccatgtacgccatggagttcgacgccatccggaagaagcaggagccgcaccacagcctgaagcccgacgactgggacaggctgcggaaccggtacgtgctgttccagtggcccctgaagcccgtggagcgggggcgctgccagttcttcctggaggaggcccgccactggcgggacacccccatcgggcacgacttccggatctaccaggagctgaacatgctgcggtgggtggacgccgaccaccaggagcaccccctgagcgccggccagcgcagcgccgtgctgcagctgctgctgacccggaagtccgaggtgaagttcgacagcctgcggaagcagaagtgccaggaccgcaccctgctgttccccgactgcacccgcttcaacctggagagcaagaagcggaaggggctgaagcaccacgccatcggggccaccctgaccgagaaccccaagctgagccccctgtggcagcggcggtgcagcgacaagggggacgacgggctgctggacgacatcttcgaggccctgcacgaggaggacgacaccgacagcctcggcagccggctggccgagatgggcctggacgccgaggccgtgcaggagctgatcgagtggccccggctgagccgggccacggccaacgtgagccggcggttcatggaggccatcgtgcccatcatgcgggaccagaagctgctgtactgggaggccgtgagcgaggtgaaggaccgcaacggcgccccgctgcggcactcccagcagcccgagggcgggcactacgacaccctgccctactacggcgaggtgctgcacggcagcaccctgggcgccaaccccgccgccgacccccagaccgcccccgagcagcacttcgggaagatcaacaaccccacggtgcacgtggccctgaacagcctgcgccgggtggtgaacaccctgaccgagcgctacggggagcggcccgtggagatccacgtggagctgtcccgggccctgaagcggacccggaccgagcgcgacgaggacgccaagcagcaggccgacaaccagaaggagaactgccgcatccgggaggagctgaccaagcacggctccgcccagcccagcgcccgggacatcaagaagtacaagctgtgggaggagctgggcaaggacaccctggcccggtgctgccccttcagcggccaggtcatcagctgcgcccagctgctgaacggggaggccgagatcgagcacatcctgcccttcaagcggaccctggacgacagcatggccaacctgaccgtggccatgcggtgggccaaccgcctgaagggcaacaagaccccctacgaggccttcgcctccaacgcctacgccgccaagggcatcgagtgggagggggtccggacccgggccgaccgcctgcccgacaacaagaagtggcggttcggccccgacgccatggcccggttcgagggcaagcccgggtccggcttcatcgcccggcagctgaccgacaacgcctacatcgccagggccgccaagcggtacctgaactgcctgaagggcgtgaagcagatcgtgcccaaccggggcgggctgaccgccctgctgcggcggaagtgggacttcaacagcatcctgtccgacaccgcctacaagagccgggaggaccaccggcaccacgcggtggacgccgccgtgatcggcctcgccgaccgggccatgctgaacagcgtgtccaagcagaccgcccggggcgccgacgaccgggtgcacattatggtgcccgagctgcccgagcccatcgagcacgccatccgggcccgggtgcccgagatcgtggtggccttcaagcccgaccacgggtggcagggcgccatgttcaaggacagcgcctacgggttcatcccgctggagcagcgggacccggacatgctggagcacaacctggtggtccggaagtccctggccgagctgaccctgaaggagtgcggcttcgtgcaggacaagaaggacaagcggatccgctacgtggtgggctgcatctgcgacgagcagatccgcagcagcgtgggcgcctacctgacccaggccgccgagaacggcgaggacctgaagaaggacgccatcctgaagaaggtcctcgcccggttcggcgccgagcacggcatcggccgggtcaggatcctggtgaccgaccagaccgtgaagcccatcgccagcgccccctacaagggctacaagcccgacagctacgtgtgctgcgacgtgtggcggtgccccaagggcaaggccggcaagtggcagcacgagcggtacgagtggcggggcgtgtactgggcctacgcggaaacccccaacggggtgcccgcgccccagacgcggaagccccaccccgccgccaagctggtggcccggctgtacaagaacgatatggtggcctacgaggagggggagcagatccgcgtcatgcgggtggcgggcttcagcaccaccaacaacaagctggacgtggtgtcccacagcgccgccgaccccaagcagagcttcgtggccatcaacgccctgggcgtggccgggctgcggaagctgtgggtgtcccccgacggccgcgtgaagggcagcacccgcaagcggcccgccgccaccaagaaggccggccaggccaagaagaagaaggactacaaggacgacgacgacaagtaa

SEQ ID NO: 653 - DNA, 4317 bp, synthetic construct
  source 1..4317: mol_type = other DNA
atggccccaaagaagaagcggaaagtcatgaagaagatcctgggcctggacctggggaccaactccatcggctgggccctggtgaacgagagcgagaacaagaacgagttctcctctctgatcaagaccggggtccggatcatccccctgtccaccgacgagtccaacgacttcgagaaggggaaggccatcagcatcaacgccgaccgcacgatgaagcggtccacccggcggaacctgcagcgctacaagctgcggcggaagcagctgctgaacgtgctgaagggcaacaagctgatcgacaacaagtccgtgctgacggagatcggccccaacagcacccacagcctgctgagcctgcgggccaaggccgccaacgaggagatctccctggagaacttcgcccgcgtgctgctggccatcaacaagaagcgggggtacaagagcaaccgcaaggccaaggacgacaccgacggccaggccatcgacggcatgcacatcgccatccagctgtacgagcagaacctgacccccggccagttcgtgtacgagcggctgaagcaggacaagaagaacatccccgacttctaccacagcgacctgcagaacgagttcgacgccatctgggagaagcagaacgagagctaccccgacatcctgaccatcgagctgaaggagtccctgaagaacaagaacaagggccagagctggaagatctgcgagaagcccttcaacatcgtgggcatcaagcagtccggcaacacccagcagaagaagctggagctgtacaagtggcgggcccaggccctgaaggagaagatcgacctggagcacctggccatcgtgatccaggagatcaactcccagatcaacaactccagcggctacctgggcgagatctccgaccgctccaagcagctgtacttcaaccgcatcaccgtgggggagtacctgtacgagcagatcaggaacaacccccacaccccgctgaagaaccaggtgttctaccgccaggactacctggacgagttcgagcggatctgggagacacagtccaagaaccgcaaggacatcctgaccaacgagctgaaggagcagatccgggacatcatcatcttctaccagcggcggctgaagtcccagaagggcctgatctccatctgcgagttcgagggcctcgacatcgagatcgagatcgacgggaagaagaagaagaaaaccatcggcccccgggtgatccccaagtccagccccctgttccaggagttcaagatctggcagatcctgaacaacctgaagttcgagaacatcgagactcacaccatctaccccatccccgagctggaccaggacctgtccatccggaagcagatcttcgacgtgctgaacaccaagggcaagctgagcccccgggaggtgctgaacaccgtcctggagaaccccgagaagtggaaggtgaagaacttcaaggagctggaggggaacagcaccaaccagaagctgttcaacatctactccaagatcgtggagctgagcggccaccgcatcaacaacaagaacctgaaggagtcctacgccgacatcttcaagaccatcgggatcaaccccgatgtgctggagttcgacgccgagctcaagagcaacctgttcgagaagcaggccagctaccagctgtggcacctgatctacagctacgagggcgacaacagcgagacaggcaacgacaagctgtacaagctgctgtacaacaagttcggcttcgagaaggactacgccaagctgctgatcaacatcagcttccagaacgactacgggaacctcagcaccaaggccatcaagaagatcctgccctacctgaaggccggccacgagtacagcgaggcctgcctgctggccggctacaaccacagccacagcatcaccaaggaggacaacgagaagcggcccctggacgacttcctggagctgctgcccaagaactccctgcggaaccccgtggtggagaagatcctgaaccagatgatcaacgtgatcaacgccatcatcgagcagtacgggaagcccgacgagatccggatcgagctggcccgggagctgaagaagtccgccgaggagcgggccgagatgacccggcagatcaccaaggccaccaccgagcacaacaagatccgggagaagctgaaggagatctaccccttcaacaccgggatccggatcacccagaacgacatcatcaagtacaagctctgggaggagctggccttcaacggctacaagaccatctacaccaacagctacgtgcccatcgagaagctgttcaccaaggagttcgacatcgagcacatcatccccaagaccgtgctgttcgatgacagcttctccaacaagaccatcgccgtgcgggacttcaaccgcatcaagtccaacaagaccgggatcgacgccgtggccgagaagtacggcaaggactccaccgagttcaagcggtacatcaacaccgtggagaagctgtacgagaacaacaagatctccaaggccaagtacaagaagctgctgatgaccgccgacgagatccccgacggcttcatcgagcgggacctgcgcaacagccagtacatcgccaagaaggcccaggagatcctgcggaagatcgtcaagaccgtgacccccaccacggggaacatcaccagcaagctgcgggaggactggcagctgatcaacgtgctccaggagctgaactgggagaagtacgccaagctggacctgaccgacttcgagatcaacaaggagggcaagaagatccccgtgatcaaggactggtccaagcggaacgaccaccggcaccacgccatggacgccatcaccgtggcgttcaccaagcccagcctgatccagtacttcaactacctgagcgcccggaagaacgagaagcacaagaagcactccaacatctacgccatcgagcagaaggaaaccttcgtgaacgacaagaacaagcggctgatcaagccgcccatccccatcgaggagttccgggccgaggccaagaagcagctggagagcatcctggtgagcttcaaggccaagaacaaggtggtgacccggaacatcaacaagaccaagaagaagtccggggagaacaagaagatcgagctgacccccagggggcagctgcacgacgagacaatctacggcaagagctgccggtacaccaccatcgaggagaaggtgggctccaagttcaccaaggactacatcaacaacgtggccatcaagagccagaaggaggccctgctgaagcggctgaacgagttcgacggcgacgccaagctggccttcacggggaagaacagccccagcaagaaccccatctacctggacgagcaccagagcgtgaagctgcccgagaaggtgaagttcgtggtgctcgaggagcggtacaccatccgcaaggagatctcccccaacctgaagatcgacaaggtgatcgacaagaagatccgggagatcctgaacaagcagctgaagcagttcgacaacgacccccagaaggccttctccaacctggaggagaaccccatctggctgatcaagcccaccgagaagaacaagtgggagaaccccgacaagcccaagagccacgagctggggatccccatcaagcgggtgaccatcaccgggatctccaacgccgaggccctccacaacaagaaggaccacctggggaacaagatcgccgacaacaacggcaaggtgatccccaccgacttcatcagccccgggaacaaccaccacatcgccatctacaaggacgaggatggcaagctgtacgaggacgtggtgtccttctacgacgccgtgacccgggtgaaccaggggagccccgtggtgtggcacacccacccggagcaccccgactggcagctgatgttcaccctgaagaagaacgagtacttcatcttccccgaccccgagaaggggttcaacccctccgagatcgacctgatgaacgaggagaactaccacttcatcagcccccacctgttccgggtgcagaagatcagctccaagaactacgtgttcaaccaccacctggagacacaggccgtgaacaacgacaccctgaagaacaagaacctggccaagaccacctacaacttcatccagacccccgagaagctgaaggagctgatcaaggtccggatcaaccacctggggcagatcgtgaagatcggggagtacaagcggcccgccgccaccaagaaggccggccaggccaagaagaagaaggactacaaggacgacgacgacaagtaa

SEQ ID NO: 654 - DNA, 3297 bp, synthetic construct
  source 1..3297: mol_type = other DNA
atggccccaaagaagaagcggaaagtcatgatcaccaccaacggcatgaagtaccggctgggcctggacatgggcaccaacagcatcggctgggtggccgtgaagctggacgaggacggccggccctgcggcgtgctgggcatgggggtgcggatcttccccgacgggcggaaggactccgccagcggggacggcccctccaacgccgagcagcgccgcatggcccggggccagcgccggcggcgggaccggtacctgaaccggcgcgccgacctgatgcaggccctgatcgactgcgggctgatgcccacctacgaggccgagcgcaagagcctggagaagctcgacccctacgagctccgggcctgcgccctggacatgaagctgccggcccaccacgtgggccgggccctgttccacctgaaccagggccgcggcttcaagtccaaccgcaagaccgagaagcgggagaaggacaccggccccgtgaaggaggccaccaagcggctgtccgaccagctgagcgccagctccgcccggaccctgggcgagctgctgtaccggcggcggtccatggacgagccggtgcggttccggaacaggaaccagggcaccaacctgaaggccgagtacgagctgtaccccacccgggagatgatcctggacgagttcgacaagatctggaaaacccagaagaagcaccaccccggggtgatgtccaacgacgccaagaagcggctgatgggcatcatcttccggcagcaggacaccgccccgcccccggtggggaagtgcaccctggaccccgccagcgacgacggcgacgccgaggggttcaggtgcgcctggagccaccccctggcccagcggttccgcatctggcaggaggtgcggaacctggaggtgcaggaaaccggcctgcggtggcgccggctgtccaaggaggagggcgacaaggtcgcccaggccctgctggagcagaacaccgtgagcttcaacaagatccggcggatcctggagctgccctccgggatctacttcaacctggagagcgagaagcgccagaagctgatgggggacgagacagccgccaagctgtctcacaaggacctcttcggcgaggcctggcgcaagctgcccctggaccggcagatcgagatcgtggacctgctggtgggggacaagagcgacgacgccgccaaggagtggctgacccgccacaccgacctgtccagcgaggccgccggccgggtggtgtccgccttcctgcccgaccggcactgccggctgggcctgcgggccatccggcggctgctgccccacatggagggcggcctggactaccccagcgccgcccgggccaccgggtacgaccacgcccgggcccccaccggggagctgagccccgacggccggctgccctactacggggagtggctgaaggaccacctggccggcagcggggaccccaaggacccgcccgacaagcggtggggccggtaccccaaccccaccgtgcacatcggcctggggcagctgcgccgggtggtgaacgccctgatcggcgagtacgggaccccgcaccagatcgtggtggaggtggtgcgggacctgaagcgcagcaagaagcagcgcgagaacatccggaaggagcaggccgccaaccagaagaagaacgaggcccgcgaccgcgagatccgggacctcgccctgcggccctcctacgagaaccggctgcggctgcgcctgtgggaggagctgaaccccaagaacgcctgcgacaggcgctgcccctactccgggcagcccatctccatcgaccagctgttctccgccgagatcgagatcgaccacctgatcccctggcaggacagcctggacgacagccccgccaacaaggtggtgtgcttccggggcgccaaccgggagaagggcaagtccacgccccacgagaagttcggcaagaccccggagtggaagggcatcgcccagcgggcctccaagctgcccccgaacaagcggtggcggttcggggccgacgcccgggagcggttcgacggccagggcggcttcctggcccggcagctgaacgagacagcctggctggcccggctgtccaaggagtacctgagcgccgtggtgcggccctacaacatctgggtgacccccggccggctgaccagtatggtgcggtacaagtgggggctgaacgagctgctgcccgggtacgaccgggaggccaagaagcggaccgaccaccggcaccacgccatcgacgccctggtggtggccatgaccgaccggtccctgctgcagcggatgtcctccgcctacgacgagacacggtcccgcatcatcgtgccctccccctgggagggcttccgggagggcgtgcagcccttcctggagcggatggtggtgtcgtacaagcccgaccggggcacccccggcaagcgggggtccacctccgggcagctgcacaaggagactgcctacgggctgatcgagttcagcgaggacgggcccagcaaggtggtggtgcggaagaagatctccgagttcaagaagcggagcgacatcgacaccgtgcgggacgccaccctgcgcgccgccctgctggagctctgggacaaggtgcactgggagggcggcaaggccgacgacttcgccaagatggccggcaccccctccgccctgggcgggggcctgcagcccgtgcggggcgtgcgggtggtggagaacatgaacgtggtggccatccgcgacaaggacggccggccctacaagggctacaagcccgacagcaacaccttcgccgacatctgggagatgggcgacaagtccaagtcctggaagatcgtggtggtgtccaccttcgacgccaaccagcccgacttcaacatcgagaagttccgccccaccaccgcccggggcaagcaccggggcaagcccgaccccgccgccaagcggctgatgcggctgcacaaggacgacatgtgcgccctgggcagcggcagcgaccgccgcatcgtgcgggtgcggaagttcgactccggcaccatcgtgttcgactcccacaacgagtcgaacgtggacgcccgcgagcgcaagggcgagatggaccgcaacaagtccatctacagcgccaagcgcctgcgggaggagggcttccgcaagatcggggtggacgagatcggccgggtgcgggaccccggccccaccaagcggcccgccgccaccaagaaggccggccaggccaagaagaagaaggactacaaggacgacgacgacaagtaa

SEQ ID NO: 655 - DNA, 3351 bp, synthetic construct
  source 1..3351: mol_type = other DNA
atggccccaaagaagaagcggaaagtcatggccgccaacgacatgcggtaccggctgggcctggacatgggcaccaactccatcggctgggccgccgtgcggctggacgacgacggcgagccgtgcggcatcgtggacatgggggtgcggatcttccccgacggccgcaaccccaccgacaagacctccaacgccgtggaccggcgcatggcccggggccagcgccggcggcgggaccgctacctgaagcggcgggaggacctgatcggggccctggtggagtacgggctgatgcccgaggacgccgaccagcggaagcgcatcgccaacgacaacgagcggttcgacccctacgagctgcgggccaaggccctggacggccagctgacccccttcgagctgggccgggccatcttccacctggaccagcggagggggttcaagagcaaccgcaagtccgagtccggcgacaacgaggacgaggcccagaaaacccggtccgacatctcccggctgcgggagagcatggaggagagcggcgcccggaccctgggcgagtacctcgccaagcggcggggcaagggcaagtccgtgcgggcccggcccggcgaggggctgtaccccgaccgggccatgtacgaggaggagttcaagcggatccgggccgcccaggaggtgcaccagagcctgtccgccgagcagtgggacaagctgcgggaggtgatcttcttccagcggcccctgaagcccgtggaccccggctggtgcctcttcgaggaggaggagcagcgggccgccaaggccctgcccctcttccaggagttccggatgctgcaggaggtgaacaacctgaagatccaggacggggtggaggaccgcttcctcaacgtgggcgagcgcgggcgggccctgcgccgcctgcggctgggctccaacatcaacctgaacgtggacaagcccctggccagcctggggctgcccagcggggccaagttcaacctggccgccgggggccggaagcgggtgaccggcgacgagacaaccgccaagctggccgccctgcccaagaaggccaccaccaagcggcccgccacccccggcatgttcgggaagcggtggctggagttcagcctggaggagcggaacgagatcgcccgcttcctcctggacaccgaggaccccgaggtggcccgggagcgggccgtgcgggagtggggcctgagcgacgcccaggccgtggccctctccaacgtgagcctggtgagcggctacggcaacctgagcgagaaggccatccggaagatcctgccccacctggagaagggcctgggctacagcgacgccgtgatcgccgccggctacccgcaccactccgacttccggaacgaggaggcccacgagcggctgccctactacggcgagatcctgacccgggacgccgtgggggccgaccccgagaaggaccccgagatctacggcgagcccgcccggtacgggcggatcgccaaccccaccgtgcacatcgggctggggcagctgcggcgggtggtgaacggcctgatccaggtgtacgggaagccggaggagatcgtggtggagctggcccgggacctgaagatgaaccgggccgacaagctgaactaccagcggtcccagaaggagggcggcgagcggaacgagcggttcgtggagatgctgaagtccatggaggagcccgtgacccaccacgtgctgcggaagctgcggctgtgggaggagcagggccctccccagaaccgcatctgcccctacacgggcaagcagctgagctgcgagatgatcgtgaccgcccgcacggagatcgaccacatcctgcccttctcccggaccctggacaacagcgtgtccaacctggtggtgtgcatggccgaggccaaccgggtgaaggggaacaacaccccctacgaggccttcgggcagaagaacccgcccgggtacgactacgactacatcctggccaacgtggccgacttcccctacaagaagcggcggcggttcgagaaggacgccatggactggttcgagggcgagcgggacttcctggaccgccagctgaacgagactcagtacctgtcccgcacggcccgcacctacctggcccacctctacaacgagaaggccgaggggtcctaccgggtgttcgccatccccggcaagatgaccgccctcctgcgccgggggtgggggctgaacggcatgctctccgagagcggcgaggagcagaccgagcggaagcagcgggacgaccaccgccaccacgccatcgacgccttcatcgtggccaacaccacccagcggctgctgcagaagttcgcccgggaggccgggtccagctggcaggacgccgccgagcggctggccgagctgacccccaagccctgggacggcttcggccggaacgagctgcggcccttcctggacaagatggtggtgtcccaccggctggaccgcggcacccggggcgtgatgggcaagaccaccgggcagctgcacaacgacaccgcctacgggatcatcaagacctccgaggacggctcctccgaggtcgtgcggcgcaagccgctgagcgacttcaagtccaagaagcacatcgaggccgtgcgggaccccgccctgcgcgacgccctgaaccagctgtgggacgacctcggcggcaaggccaccgagttcgccgagcacgccgagcgcaagggcgtggtggtgaacggccgcgtgcagaaggtgcggcgggtgcgggtggtcgagaagcagcgggtgatccccatccgcgacagcgagggcaaggcctacaagggctacctgcccggcggcaacgagttcgccgacatctggcagatgcgggacggcagctggcgggtggtggtggtgcccaccttcgacgccaaccagcccggcttcgacatcgagaagttccggcccctgaccaccaagggcaagtacaagggcaagcccgacccctccgccaagcgcctgatgcgcatccagatcgacgacatgggcgccctgggggaggggtcggagcagcgcatcgtgcgggtgcgcaagatgagcaactccaagtccggggccctggtgtggctggacgaccacaacgaggccaacgtggccgcccgcgtgggcaagcgggagatccgggacatgaagtacagcgcccggcagctgcaccagcacgggttccggaaggtccgggtgaacgagatcgggaaggtgatccgggaccccgggccctactcctccaagcggcccgccgccaccaagaaggccggccaggccaagaagaagaaggactacaaggacgacgacgacaagtaa

SEQ ID NO: 656 - DNA, 3375 bp, synthetic construct
  source 1..3375: mol_type = other DNA
atggccccaaagaagaagcggaaagtcatggtgaagtacgtgctgggcctggacctggggcccacctccatcgggtgggccgccatcgccatcgacgagaacgggaacttcctggggttcctgaagatcagcgactccaaggacggcctgcactggatccccgccatcaacagccggatcttccccatgccctacgtggagaaaacctactgcgccggcaacaaggagacaacccggaacaagaaccggcgggacgcccggggcgccaagcgccgctaccagcggcgcagccagcggctgaacgagacatactgcttcctgcacgagcggaacatcctgcccgagcggaacgagtacgagaagctgctgagcctggaccccttcgagatccgggccaaggccctggaggagcggatcgacctgcaccacgtgggccgggccatcatgcacatcgccaagcggcggggcttcaagtccaacagcaagctgggcggcctgatcgacgtggacaccgacaacaagcggaagaagaaggacaagtccaagatcaccctgctgaacacctacgagggcaagaccatcggccagatctgctacgagaagcacaaggacgacatctgcaccgccgtgcggaacaagggcgagatgaacatctggcagcggaaggactacatcgacgaggtgtgccgcatctggaagtgccagcagcagtactaccccaccatcctgaccgacgacgtgctggaggacctggtgagcgaggacgggagcaagtggctcctgttctcgcagcacagctacaagctgagcgcccgcaagcagcggaagtacatcgggaagtgcagcctctggaaggagaagctgcgctgcgacaagtccaagcgcgtcgcccaggagttcgtgctgctgcagaccatcaactacctggagatctacgactcctacgggagcaagatcgagtgcggcgtgtccaaggaggacaagcagaagatcctggagtacatctcctccttcgagaaggggaagaagtactcccagatcaagaagcacctcgggtaccccgaggactggcgcttcaacttcgaggacgtggaggaggacaactccctgcccggcatcgccgtggacgacctgatccgggtcatcttcggcgagcgcaagggcaacaagtacgtgcagatcgtggactactccgaccgggaggccgtgtgggagatcgtcctcctgtacatcgacgaggagatctcctacaacgagctgcgcaagcagatggtgaagttcgacgtggaggtgcccgacgaggacatcctgaacgccaagctgtccaaggccaaggtgcccgacgggcacgtgaagtactgcgaggagatcgtgaagatcctgaacgccgagatgctgaagggcatcaacctccacgaggccaagcagcgcgtgtgcaagcgcctggggctgaagaacaacagccgggtgctgagcaagctgcccatcccggaccgggcccacggcttcgagactaccaaccccaacgtgaaggtggtcctgcacgaggtgcggaagatcgtcaaccagctgatcaaggagttcggcaagcccgagcggatcatgatcgagtgcgggcggtccatcaaggccaacaagaagcagcgcgaggtgatcaagaagaagcagaaggacaacaacaccctgaagaagtccgtgcgggagatcttcgacgtgaacgaccagatccccgccttcatcaagtgcaacaagcccggctgggccatcaagcgctacatcctgtggcagcagcagaaggggatgtgcccctacctggactccagcaagaagcagatccccctgtccaagctgttctccagcgaggtggagatcgaccacatcatcccccgggagatcagcttcgacaacagcctgaacaaccaggtggtgtgctacaccaacgagaaccgcaacaaggggctgaacacccccatctcctggctgaaggagacaaaccccgagaagtgggtgaacacccagaacgccatcaagcactggaaggagctgaccaagcgggagaagatcaccatcgacggcgaggagatcaccctggagcccaaccgcaacaagtgggagcggttcttcgtgaacaacaaggacgtgcacaacaagtactcccccaagaacctgctgaacgacaacagctacatcgccaacgaggtgaagaagtacctgctgcggctgtaccccagcgagaaccagcagggccgccagaacgtggacaccaccaagggcatgatcacctccgagctgcggaagatctggggcgtgaactccatcctgcggaaggacgacatcgaccagaagaaccgcggcgaccaccggcaccacgccatcgacgccgccatctgcgccgtgaccacccacagcgagatccagaagatcacccgggagctccagcaggccttccccgagacagactacggcaagatcaagatctccaagccgtggtctggcttcgagcgggacctgaaggaggtgatcgacagcatcaacgtgagccaccggccccgccggcaggtgcggggcagcctgcacggcgacagcttctgggccaaggactccaacgggaagttcgtgcagcggaagaaggtgaaggacgccaacgtgtccaccgtgtgcgacgagaaggtccgggacctgatcaagaagtggaaggagtccaaccagagcgagtaccccatgctgcccaacaacaaccacaacgtgaacaacggggagcccatccccgtgaagaaggtgaagtgctacagcggcaagaacgagaaccagttcatcgagatccggcccggcaagtacgtggagaagcccgagaaccaccacgtggagctgttcgagctggaggagaacggctccacccagatcatcgccaagatctggaacacctacgaggtgtccaagcggatcgccaacgcgaaccgcaagtacaacaagctggccaagtccggcgagaagctgaacatgaccaactgcatcgtgatccgggagcaccccgagtacagcgaggccaccttcaagttcagcttctccaagggggacatcatccagatggactccaagaagggcggccgcgcgtactaccgggccgtgagcatcggggagaacgactactggttctgggagctgcacatcgccagcaacgagaagcccaaggccgacgacctggacggccaccggctccggagccccaacaagttcctggagctgaacgccaagaaggtgaccgtggcccctctgggccgcgtgcgctgggccaacgacaagcggcccgccgccaccaagaaggccggccaggccaagaagaagaaggactacaaggacgacgacgacaagtaa

SEQ ID NO: 657 - DNA, 4947 bp, synthetic construct
  source 1..4947: mol_type = other DNA
atggccccaaagaagaagcggaaagtcatgagcaagcggcagtccgtgatctcccccatctccatcgacctgggggccaagaacacgggggtgtacttcgcccactactccgccggctcctccgtccacgacatcgagaagtgggggcgggtgtaccggctggagaaggacgactacaccctgctcatgaccaagcggacgatggcccggcaccagcgccgcggctacaagcggcgcaagatggtgaagcggctgttccgcctgatctggtgccaggagttcggcctgaagtgggacgactccgtgcagcagaccgtgagcttcctgctgaaccggcgggggttcagctacctgaccgacgagttccacaccgagttcctggacgagttcccgaaggaggccttctgcgagctccccgagaacatccggaacgagctgcaccactacagcaagatcaacgagagcctgttcgagtggaagcagctcggggccaaccacgtgatcgacctgctgagcgagctcagcgagaagccccagaagatcaagcgccggctggtggtgatcagccgggccaaggagctcaagacccactgcgagtcccgcatcgaggggaacgagatcgagggcaacaagaagcggaactccaagctgcgcaagctgagcaagtgggtcgtggagtcgtgggtcagcgagggcatccgctgcgccgacgccatcgacgagaaggccaacgtggtggacatgatcctgtacctggaccagatcgagctggagaaggtcaagacgatgctggagagcatccccatcgacgagcacgagtccgaggccaaggagctgcgcgcctccctgtggaacttcgacatcgggaagttcgacctggagaaggccgacttcgagaagaacttcgtgcgcagccacatccaccacttcgccttcgccctgaacaagatcaaggacgagctgaccagcggggcccggcaccggtccaagtacttcgaggagatccacgacgtgctgagccggaacaaccacacccaccggtacctggccgagttctgcaccaagctgcagaactgcgagtacaccagccagaaccgcacccccatcaccgtggcctcgctgagcaagctcatcgggcacctgtccaacctggagctgaagcccctgcggaagtacttcaacgacgtgcagcacaagcacgaggactgctgggacggcgagcggctgtccgagctgttcggccgctggatcctgaaggagtggcgggtggacctgaccaaggaccgggacaaggccgagggcaagcggggcgactaccgcaacctgcgggacaagtggaagtcccacgggtccggcgtggtggacttctggctgcaggaggacccccacctgaccatcccgccctaccaggacaacaacaaccggcggcccccgcggtgccagagcctggtgctgaaccccgtgttcctggacgagaagtacgagcgctggcagtactgggtgtccgagctgaccagcctcatcgaggtgaacgagtacctcaaggactaccagaccgacctggggtccctgaagtccggcaagggccggttctacttcagcgacgaccagctggccggcaaccgcaagatcgacgccggccggcggacccgcaaggacctggacgcccgggtcctgcagttcatcctggacagggtgaaggccagcgaccccctcaagctgaacgagatcttctcccacgtgaagaagatccggcagctgcagagcacccccgaggagaagaagatcgccacccggaagctggaggacagcatcaagtgctccaagctgccggacgagctcaagaccaagcggcactacaagaacgagggggtgttcagccggggcagcttcctgcacctggtgtgcaactactacaagaaccggcagaaggcccgggacggccgcctgttcatccaccccgagtaccactacgtggagaactgcggcttcacccggaccggccggttcgagagcagcacccacctgctgacctactgcaaccacatcccccgccacagccacaaccagctggtggagaacctggccgccctgttcgccctgagcccccagcagctgatgcagcggaccaacagctccaccaacaaggacctgctggactggctggagcggatcaagggcctgaagtccaactgcgagaaggccgccaaggagcagaaggtgcggcggggccggctcaaggaggacatcctggccacccaggaggactccaagagcgagctggggaagctgaaggacaagtccatcaacctgtccatccagctgtacgaccagctcaactgcaaggtgggcgactccacctccaaggaccccgtggccagcgtgttcctgctggcccagatcaacaacatcgccttcagcgacagcgggggcaagtccaagacctgcgccgtctgctccctggacaacgcccggcggatgcagttcgccagcgacagcgtgcacgcccagcggctgcccgccatccccacccggctgatcgacggggccgtgatgcggatggcccgcatcaccacccacgcgatcgccaaggacaagtgggagacaatcgaggacaacctcaagaaggggatgaccgtgcgggtgcccatcatcaccgagagcaaccggttcgagttcgagcccagcctgaacgccctgaaggggcgcaagagcgaccccaacaccagccgggtgtacagcaagcaggaccgcatcaagtccgccgccggcaacatctccccctacagcggggagactgtgggggacgagggcgacctcgaccacatcatcccccgcagccaccccgagtgggggaccctgaacgacgaggccaacctgatctacacctccaagcaggacaaccgggacgtgaagggcaaccgcatctacaccctgagcgacctgcacgagaactacaagctgaccgtgttcaacctgtccgagagcaccgagatcgccaactggatcgagacaaccatctgggacgccgagaaggaggacttcaagttcggccagtacttctccttctccggcctgaacatcgaccagcagaaggccttccggcacgccctgttcctggagaacgggaaccccatccgggaggccgtgctgggcgccatcaaccaccgggccaagaccctggtgaatggcacccagcgctacttcgccgaggtgctggccaacgagctgcacaagaaggcgaaggccatcaacaagcaccacctgctgagcttcgactacttcggggtcgaggctcaggacaactcccgcggcgacgggatccacaacctgcgggaggacctggtgaagttctaccggcaggacctggacgtgttctccaagaaggacgacgagccccaggaggcctacagccacctgctggacgcgcaggtggccttctgcatgatcgtggacgcccaccgggacgacggcgggctccgcatcgacctggaggacatcgggatctggtcccgggtggaccgcaacaccggggagatccagaccggcaagaaccgcaagatctacgggtccgagctgttcgacgccatcgaggtgaagcccaaccagatgcgccgcatcaacctgaagcggtaccccctggagcagaaccgcttcagccaccgcatgatccaccgggacaccctgtacgccgagcactacctgcccatcctggtggaccgggagacatccaagatccggatcggcttcgactggaagaacagcttcgagctgaacgagtccatcaccaaccggcagaacctgtacttcgccctgaagttcaaccccaagaccaaggacatgaacctgaccaaggacgagtccttcgaggacctggtgaaccggctggagcagatcgggaactggaagaagtccggcaccaacttcctgtgcctgcccctgcggaagcagatgatccacaactactacatcgagaacttcaacaccgccaacggcatcagcgggaaggaccaggggtccggcttcaagttcctgcggaacaagctggcctaccgcaccgagcggaagcggatcaccaccctgaaggaggccaagatcatcctggaccgggagtccaacttccagctgcccaagtcccagtccgggctggtgctgcccgtgaaggaggagtggaagaagctggtggccgcctggaagcggaagccggagtccaccgaggactccgagttcctgagccgctacttcatcaagaaccccgacaacaagcccagccacgagaagttccggaccgagttcagcctgcccatcaagaccccgcacggcaagatcctggtcaagcggaacagctgggacgacagcttcatcttccagatcctgaacgacagcgacccctccggggccaaggccttcctgcccgtgttcaagaacggcaagctggccaagctgctgagcaacagcgccaacagcagcaacgtgttcctgttcacccaggagaactactacagcgaggccaccggggagatccggagcttcgaccccgacaagtggtacgctgtcaacctgagcgagaacgagaaggtgcaggggatcgagagcctggagtaccagatccccgacaacacccggcccgtgatccgggtgaagttcagcgagtcccggaacggggacgacgtgggggagatcctgaagtcctccagcctgcaccccctgctggcccccaggctgccctccttcaaggacaaggacaaggagaacctggccatccagcagctgctggaggagctgaaggagaagctgtcccaggggaagcccctggagtacaagggcgccagcttcagccgcgagatcaagcggaagctgagcgagatcctgaagcggcccgccgccaccaagaaggccggccaggccaagaagaagaaggactacaaggacgacgacgacaagtaa

SEQ ID NO: 658 - DNA, 3162 bp, synthetic construct
  source 1..3162: mol_type = other DNA
atggccccaaagaagaagcggaaagtcatggcctacgtgctggccctggacatcggcatcgccagcgtgggcctgagcggggtggactaccccaacgaggacatcctgttctgcaactcccacgtgttcgacgccgccgagaaccccaagaacggggccagcctggccctgccccggcgggagaagcgggggcagcgccgggtgatccggcggcgggccggccgcaagaaggccgtgcggcggctgctgagccagcacggcctgcgggacatcgacgtgatcgacgccagcaagtccagcaacgtgctgtgcgtgtgggagctgcggaaggaggccctggagcgcctgctgaacgacgccgagttcgtgcgggtgctgttccacatcgccaagcaccggggcttccagtccaaccgcaaggaccagtccgagcggaacgacatcgagggcatgaaggtgctgaccggggccaaggagctggaggaggccatgatccgctccggccgcgagacagtgggcgcctacatcagcaccctcgacaagaagcgcaacggcgacggggactactcccggatggtgacccgggacctgctgcacagcgaggtgaagtacatcttcgacgcccagcgcaagtacaagaacgacaaggccacccaggagctggagcacgagtacgccgccatcgccttcacccagaagcccctgcgctccagcgcctggatggtgggggactgcaccctggagcccgccgagaagcgggcccccaagcactcctacaccgccgagctgttcgtgctgtggtccaagctgaacaacctgaagatccggaccaccgggaagggcgagcgcttcctgacccccgacgagaagaacaagatcaccgccctggtgcacgcccacaagaccggcgtgacctacaccaggctgcggaacaccctgagcctggaggaggccgagcggttcaacatcggctaccgcaagaccaagaaggagcaggacagctgggagaagatccgcaaggccaccgaggccgggaagttcttcgtgctggacgggtaccagaccctgaaggaggtgctcgccgactccgacatcgactggcagaaccgcctgcagaacaagcgcgagcagctcgacgaggccgcccggatcctgtccttctacgaggacgagaaggagatccgggacctgctgtcccaggccggcttctccgagaaggagcaggaccggctgctgaagatcaccggcttcagcaagaccgtggacctgagcctgaaggccatccggaagatcctgccccacatgatgcagggcctgacctacgacaaggcctgcgacaaggccggctacgacccccacggggccgccggcgggcagaagggggacaagctgccccctttcgaggacatccggaacccggtggtgaaccgggccctggcccagtcccggaagatcatcaacgcctgcatccggacctacggcatgcccgagacaatcatcctggagttcggccgggacatcggcaagagcaagcaggaccgggacaagatcgagcgcaccatcaagcagaacgaggcccaccgggaggaggccaagaagcacttcatcgagctgaccggccaggccgaggcccggggcggggacatcctgaagtaccggctgtggcaggagcaggaccacacctgcccctactgcggcgtgtgcatcagcggggacgagttcaaggaccccctggccacccagatcgaccacatcctgccctactcccggaccttcgacgacagctacatgaacaaggtgctgtgccacatgcagtgcaaccaggacaagggcaaccgcaccccgttcgagtggctggggcagaaggccatctgggacaaggtggaggccctgagcgcccacctgcccaagcccaaggccgaccggttcgtgatggaggtgctggacgaggaggggttcaaggagcggaacctgaacgacacccggtacatcgcccggctcctgaagtccctcctcgagaagcacctggacatgggcgagggcaaccgcatccagacccggaacgggcggctgaccgcccacctccggcggatgtggggcctgcagaagtcccgggacaccgaccggcaccacgccctggacgccatcgtgctggcctgctccacccagagccacgtgcagcggctgtccaactggaaccggtacgaggccaagaagggcaaggccgagccctacgcccccaagccctgggacaccttccgggaggacgccctggaggccgtgtcccagatcttcgtgagccggctgcccgtgcggaaggtgaccggggccgcccacgaggacaccatccgcagccagcgggccaacggggagatcgtgcagcgggtgaagctggccggcctgaagcccgacatgctggagcggctggtggacaaggagcggaacaccgccctgtacaccgtgctgaaggagcggctggacgcccacgggggcaagcccgagaaggccttcgtggagccggtgtacatgccctgcaaggaccccggcaagcagggccccaagatcaacgccgtgcggatcgtgaccaaggagaagtccggcatccccatcaacgaggggatcgccagcaacggcgggatggtccgcaccgacgtgttcgagaagggcgggaagtactacctgtgccccgtgtacgtccaccagatccgcaagggcaagggggccctgcccaacaaggtgatcaccggcaaggaggagaaggactggaccgtgatcgacgacagctaccggttcctcttctccatgcacaagaacgacctgatccgggtggtgaagaaggacggcaccaacgccttcggctactaccgcaccaccgaccgctccggcgggaccatcaagatctgcgcccacgacaacgacagctccttcggcaacaaggggctgatgaagatcggggtgcagaacctgaagtccttcgagaagtacaccgtggactacttcgggaacaagtcccgggtgcggaaggaggagcggaacggcatggcctacgccgccgacagcgagtccggccagaccctggccgtggagaagcggcccgccgccaccaagaaggccggccaggccaagaagaagaaggactacaaggacgacgacgacaagtaa

SEQ ID NO: 659 - DNA, 3366 bp, synthetic construct
  source 1..3366: mol_type = other DNA
atggccccaaagaagaagcggaaagtcatgaagtaccggctgggcctggacctggggtccaccagcatcggctggaccgtcctgaagctggacggcaagggggagatcttctccctcgaggacatgggctcccggatcttcagcgacggccgggacgcccagtccaagaagcccctgaacgtggcccggcgggagcaccgcggggcccggcggaacaactaccgcaagttcaagcggaagtccgagctgctggaggtgctcatcaagcacaacatgatgaccaccaaccgcgaggagcagaagatcgtggccaacaagaacccctacaagctgcggaagcgcggcctggacgagcggctcagcctgtacgacttcggccgggccctgttccacctgggccagaagcggggcttcaagtccaaccgcaagtacgacaaccaggaggccgagaagtccaacatgaaggtggccatggccgacttcaagaacaagctggccaagtccaactgccggaccatcggcgagtacttctgcgacaagatcgagaacggcgagcgggtgaagatcaccgtgagcaacgtgggcagcaagaactcctactcctacgtgctcaaccgggagcaggtggaggacgagttccagaagctgtgggtggcccaggccaagttccacagcgagctgaccgaggagatcaagaacgagatctaccacgccatcttctggcagcgggacctgaagccccaggagaagggcaagtgccagttcgagcagggggagccccggatcgccaaggcccaccccctgttccagctgttccggatctggcaggaggtgaacaacctgaagatcatcaccttcgaggggaagaagcaggacctgaccctcgaggagaaggtgaagctggtgcagaagctgagctcccagaagtcctgcaagttcagcgccctgcgcaacgagatcttcggccgggccctggccaacaactacgagttcaacttcgagaagtccgagagccgggacggcctggagggcaacctgaccttctccatcttccggagcgagaagtgcttcggggccgagtgggacaagttcgacctgcccacccagaacctgatcgtggagaagatcctgaacgaggagaacatcaaggaggtggagaagaacctggtgtcctggctgtccaagacctacgacgtgagccaggagaaggccgagtacatctccagcgtcagcctgccctccggctacgccaacgtgtccaagaaggccatcgagaagctgctgccctacctggagaaggggctgcagctgcacgaggccatcgaggaggtggagtacaccatcaacaactacgacggcaccctgtacgacgagggcaacctgccctactacggggaggtgatgccccaccacgccctgttcggcaacggggatcagaaccagatccccgagatctgctacggcaagatcggcaaccccacggtgcacatcgtgctgaaccagctgcggaccatcgtgaacctgctgtgcaagaagtacggcgcccccaagcagatcgtgatcgagctggcccgggagctgaagctgagcaagaagaagaacgacgagatcaacgagactaacgagaagaaccgcaagtccaacgagaaggccgtggccttcctggccgagcacggcctgcccaagaacaaggagaacatcatcaagtacaagctgtgggtggagctgaacgccaaggacgacaagaaccggtgctgcccctacaccggcaagaacatcggcttcaccaccctgttctccaacaaggtggagatcgagcacatcctgcccaagagccggaccttcgacgactcctacgccaacaagaccctgtgcttccggcaggccaacctggacaaggggaaccggtccccctacgaggccttcgggcagaactccatccccgagtacaactggaagaacatcatcgaccgggtgaaggagaacctgcccaagaacaagcagtggcggttctaccccgacgccatggagaagtacgagggggagaaccccatcatcgcccggatgctgaacgacaccaagtacgtcagcaagatcgcccgggagtacatgcagtacgtgtgcggggccaacaacgtgtggaccatccagggccagctgaccgccaagctgcgccaccactggggcctgaacagcctgatcgccgacgacaacaacaagaaccgggccgatcaccggcaccacgccatcgacgccttcgtgatcgcctgcaccacccggggcatgctgcagaagatcttcacccaggtgcgggagtcccgggaccggctgatcgagaagatgcccccgcccttcgagaacttcaacctgtccgagatgcagagcctggtggacaacatcctggtgtcccacaagcaggaccggcacggggccaccaagcacatccggaagaacctgcacgcctggaacaaaaagaccttcggcgagctgcacaaggccaccgcctacggcctgtacggcgccaccatcctgctgaagaacctgaagaaggaggacctgccgtacctgatccacaacgagcactacccccagctccgggactacctggaggggaagatcaagtccaaggacgtgcccaagatcgacatcatcctgcggttcaacaagaccttcgacctgtacaagtccagcctgatcgaccgcatcaagaagatcagcctgagcatccggcggcccatcaccgagatccggagcaacgagatcgtgtgcaacaactacatccgggagatcctgagcaagaagtccaacaacagcgagaacctgaccaagctggggatcatccgggtgaaggtgttcgacgactccatcgaccccaagaccgtgatccccatctacgacaagaacgggatcccctacaagtacttcgtgtccggcaacaactactgcctggacatctacatgcccaaccggggcaccaacgccggcaagtggcagatggaggtgatcagcaacttccaggcccaccagaaggacttcaagcccaactggaagatcgccgagcccgaggccaagctgatcatgcggctgttcatcaacgacatcgtgaagtacgaggacgaggaggagaaggagatcattgggcgcgtgaagaagatggatcagcaccgggcctacatcaagaacatccggatctccgacgacaccgacggggtgtcgttcagcatctccaagttcatcaagaccaaggcccggaaggtgtacatctcccccatcggggagctgtacgagcccaagcggcccgccgccaccaagaaggccggccaggccaagaagaagaaggactacaaggacgacgacgacaagtaa

SEQ ID NO: 660 - DNA, 3231 bp, synthetic construct
  source 1..3231: mol_type = other DNA
atggccccaaagaagaagcggaaagtcatgcccctggtgttcggcctggacatcgggaccacctccgtggggttcgccgtgatcgactacgacagcgagctggccacggggaaggtgcaccggctgggcgtgcgcatcttccccgaggcccgggaccccaagggggtgcccctgaaccaggagcggcgccaggcccggctgcggcgccggcagctgcgccggcgccgcgagcggcgccggctgctgtccgagcacctgtgcgccgccgggctgctgcccacccgcaacagcagcgagtgggagtgcgccatgaagcgcgacccctacgacctgcggcggcgcgccttcgagggggaaaccctgagcccccacgagatcgggcgcgccatctaccacctgatgcagcgccggcacttcaaggggcgggacatcgacgaggtgtccgacaccgccgactccgccggcgacgacgccgacgacaagcaggccacctccgcccgggagctgaccgggcaggccctgaagcgggagggcaagaccctgggggcctggctggccgcccggggcccccacgagcggaagcggggcgagcacgccacccgctccctcgtggaggacgagttcgacaaggtgtggaagcccctgatccccgagcccttccgcagcctggtgcgcgacgtgatcttcgtgcagcggcccgtgttctggcggctcaagaccctgggccgctgccgcttcgtgcccgaggccagggtctgccccaagggctcctgggtgtcccagcagcggcgcatgctggagaagctgaacaacctggccctggccgggggcaaccagcggcccctggaccccgacgagcggcaggccatcctgagccggctgcagacccaggccagcatgacctgggccggggtccggcgggccctggcgcccctgtacagggcccggggcgagcccggcgaggagcgcgccctgaagttcaacctgcaggagggcggggagaaaaccctgctgggcaaccccgtggaggccaagatcgccgacatcttcggcaacgagtggcagaaccacccccggaagcaggagatccgggacgtgctgccacaccagatctggcaggccgactacgaggaggtgggcggccagcgggtgatcatcctgcccaagaccgagcgggtgtcccggcgggccgcggtggtgcggaacttcgtgtccgagttcagcctgagcgacgcccaggcctccaagatcgagacaatgaagctgcccagcgggtgggagccctacagcgtggaggccctgcaggccatgctgccctacctggaggagggcgtgcgcttcggcgagctcatcaacgggcccgactgggaggactggcgggccgaaaccttccccgggcgggagcagcccaccggggaggtgttcgaccgcctgccctcccccgcccagcgggaggagtccgagcacgtggccgggctgcggaaccccaccgtggcccggacccgcaacgagctgcggaaggtggtgaacaacctgctggacctgtacggcaagcccgacctgatccgggtcgaggtggcccgggacgtggggaactccaagcggcagcgcgaggagaaggccaccggcatccggcggcaggagctgcgccggaaggccgcccgggagaagctgcagcagtacggcatctccgagcccagccgggccgacgtggagaagtggatgctgtgggaggagtgcgggcaccagtgcccgtacaccggcgacttcatcagcttcgacgccctgttcaagaccggggacttcgacgtggagcacgtctggccccggttccggagcctggacaactccttccggaacaagaccctgtgccggaaggacgtgaacctccagaaggggaaccagaccccctacgagttcttccggggcaaccaggaggagtgggacgccatcgccaaccggctggccaacatgaaggccagcaagtcccgccccgggatgcccccggggaagatccggcgcttcctggcccggagcatccccgaggacttcgcggcccggcagctcaacgacaccgggtacgccgcccgggacgccgtgacctacctgaagaagctgtggcccgaccaggggcccgacgcccctctgaaggtgtccgccgtgtccgggcgggtgaccggccacctgcggcgcctgtgggggctgaacaacatcctggccgactccggcgagaaaacccggagcgaccaccggcaccacgccatcgacgccctgacggtggcctgctgccaccccgggatgacccagaagctgtcccggtactggcaggaggaggacgacccccgggccacccagcccctgctgccgccgccctggaaaaccatccggagcgacgccgagaaggccgccgccagcatcatcgtgagccaccgggtgcggaagaagatcagcggccagctgcacaaggccaccgtgtacggcgacaccgacgaggaggtggagggcggccgcggggtgacctaccgcaacttcgtgcggcggaaggccgtggaggtgctgaagaactccgaggccccgcggttcaacggcacccggatcatcgacatcgtggatgacggggtgcgggacatcatccggagctgggtggagcgccacggcggcgacccctccgccgccttcgtgcagggctaccccaagcgcagccggaagggccccgagatccgcaaggtgcggctgcgggtcaagcagcagatcgagctgatgaccaaggccagcaccggcttcgccgacctgggcaacaaccaccacatcgccatcttccggctgaccgacggcaccatcgactacgaggtggtgtccctgctggaggccagccggcggaaggagcggcgggagcccgtggtgaagcgggtgcgggacaacggggcccggttcgtgatgagcctgagccccggggacagcctgcagctgacccggaacgtggagacacggctcaagatcgtgaccagcgtgtggtccgagggccgggtggtgctggtggaccacgacgacgccaagggcaccaccgagttccggcccggggccaagaccatcgtgagcaacggcggcaagaaggtggccgtggaccccatcggccgcatccggcccgccaacgacaagcggcccgccgccaccaagaaggccggccaggccaagaagaagaaggactacaaggacgacgacgacaagtaa

SEQ ID NO: 661 - DNA, 3306 bp, synthetic construct
  source 1..3306: mol_type = other DNA
atggccccaaagaagaagcggaaagtcatgtcctacatcctgggcctggacctgggggagacatccgtgggctgggccgtgctggaggagcgcggcaacaagcccgtggccctgaaggacgccggggtgcgggtgttccccaagggggccgaggtggacgagaagcgggggatcagcacctccgagtctcagacccggcggcagaagcggtcccagcgccggatcatccggcgccggagcgaccgcaagaaggccctgaagaacctgctgctgagccacgccctgctgcccagcgacaacgagaagcaggagtccctgctgcaggccgacccctacgagatccggacccggggcctggacaccaagctgcggcccaacgagatcggccgcgccctggtgcacatcaaccagcggcgcggcttcaagtccaaccgcaagagcggggacctgaaggaggagggcatcctggccacctccatcgggaccctggccaaggccatggaggagtcccaggcccgcagcttcggggagtacctgtaccggctggacagcgggtacgacaagggggcctccaaggagaacacccgggagcggcagggcgtggccctgcggaaccggggcggcgggtacgagcacctgccgtcccgggccatgatcgaggacgagttccacctgctgtggagcgcccaggccgcccaccaccccggcctgctgaccaaggacctgaagcgggccgtggagggcatcatcttctaccagcggtcctacgccatcagcgaggaccgccgggccagctggggcaagaagttcgtgaacgccaagatggcgccccagctgaagcactgccccctgttccccgaggagtaccgctccccggccgggacctgggaggcccagcgcttccgcctgctgaaggaggtgaacaacctggaggtgctggacgagtacggcaagggccggaagctcgacaccgccgagcgcaagacgctggtggacgccctgggcatcgaggagaagcagaccttcgtgcagctgagcaagctgatcgccctgcccaaggagcaccgcttcaacctcgaggccggggagcggaagcacctggacggcaacaagttcgaggtgcagctgatcaagggctactacgggaagaaaaccaagaaggagaaggaggcctggctggccctggacggggacttcaagggccacctgcgggagctggtggccaacgtggaggacgccgaccagttcaccgagactgccaaggagctgggcctgaccgagaagcagatcgaggggctgcggaccgtgcagcccaccgggaactacctggcctacagctacaaggccatccagaacctgctgcagttcctggaggacggcctggacgagtaccacgccatccagaaggcccgggagcagggcgtgatcccgccctccaacgagcccgacgagtacgacctgctccccctgccgccggacctgcccaaccccatcgtgacccgggccctgcacgagactcggaaggtggtgaacctgctgatcaagacctacggcaagcccagccgcatcgtggtggagctggcccgggaggtgaagcacggccccaagcgccggcagagcatctcccggaccatcgaggagaaccgcaagcggaacgagaaggtgaaggcctggtaccgcgagcacggggtgctgacccccacccgggacgacgtgatcaagtacaagctgtgggaggaccagaaccacctgtgcgtgtacaccggcaagaccatcgaccaggaggacctgctgagcgaccagaacgtggtcgacatcgaccacatcctgccccgcagcaggtccttcgacgacagctaccgcaacaaggtgctgtgcgtcacccaggccaaccgggagaagggccagcgcctgcccgtggagtggctgggcgggcccgggaacgagcggttcgacaagatgctggtgcggctgaagaacatgcccagcatcgggcacgacaagttcgcccgcttcaaccaggagaagatcgacaccgagcacgccatcgcccggcagctggtggacacccagtacatcagccgcgaggcggtggcctacctgaaccagctgttccccaaggagctgcgggtgggggagaaggccgtgggcaccgtgatcggcaagctgacctccgacctgcggcacgtgtggggcctgaacaccatcctgagcgggcaggaggacctgaagaaccgggaggaccaccgccaccacgccctggacgccatcgtggtggcctgcgccacccggaagcacgtccaggagctggccaagcggtccaagtgggggcaggacccctccgaggtgcccccgccctggaagcgcttccgggacgacgtgaagcatatggtggactcccggaagcgcacctggaagctgggggaccaggagatcaccacggaggggatgctggtgtcccaccgggccgagaagaagatcctgggcggcttccaccaggagacaaactacggccccacgcgggaccccgagtggttcgtgcggcgggtcggggtccgctccctgaccgggcccatgatcaagggcatccgggacgacgccatccggcggatcctgaccaagcactgcgaggagaacgggtacaaccccgagcaggacggccggaccatcccgcccaaggtgttccagaccctgcccacgatgccctccggcgtgcccatccgcagcgtgcggatcgtggagcgcaagcagaagggcatcgaggtgttcggcgggaagaacggcatcgccccgcgggccgtcctgctggggaacaaccaccacctggagatggtggagcgggacaacaacggggtgaaggagatgctggtgtgcatcgtccccaccctggaggccgcccgccgctcccgcatccgcaaggagcccatcgtgcagcgggaccacggggagggcatgaccttcaagctctccctggcccgcaaggaggccgtggtgttccacaagaacgggaagcaccacctgtgctacatcagcaagatgagcggctcctccaccctgagcaagggctccgggtccatggacctgaccttccggctggacaaggacgcccggcccgccggggagggcaacaagagccccttcgcccgcatcgtgtccttcaaggcctgggatgagcactcccccatcaaggtggccgtggaccccatcggccgcctgtccaaggccaacgacaagcggcccgccgccaccaagaaggccggccaggccaagaagaagaaggactacaaggacgacgacgacaagtaa

SEQ ID NO: 662 - DNA, 3297 bp, synthetic construct
  source 1..3297: mol_type = other DNA
atggccccaaagaagaagcggaaagtcatgagcacctgcgccgagcccagcgacagctacgtgctggggctggacctcggcgtgagctccctgggctggagctgcctgaacgtgaccaccgagcaggccttcagcatccgctgcgtgggcgtgcggatcttcgaggccggcgtggacgggtccatcgagcagggcaaggactccagccgcgccaccgtgcggcgggagaagcgccagccccggcgccagatcgagcgccggagccggcgccagcggaagatcttccgcatcctccagcgccaggggctcatgcccgacggccccagcaccgaccaggtgcagatcgaccggctgatcagcgacctggaccgcaccctgcggacccagctgctgaagcccggcgaccacatcgccgcccaggtgtggccctacaagctgcgggccatggccatggaccagcacctggagccccacgtgctgggccgggccctgtaccacctggcccagcggcggggcttcctcaccaaccgcaagaccgacaaggacgacgaggagagcggcaaggtgaaggccggcatcgccgagctgtcccgggacatgggcaaccagaccctggggcagtacctggcgagcctggaccccgacaccgtgcggatccgccagcggtggaccgcgcggcagatgtacgaggacgagttcgagaagatctggaccgcccagcagacccaccaccccaagctgctgaccccgcggttcaagcggaagctggagcaggccatcttcaagcagcggccgctgaagtccagcaaggccctgatcggccggtgccagctggagcccgaccggcggaaggcccagctggccagccccctggcccagcggttccggctgctggccgccgtgaacaacctgctgatctacgagcccgacggcaagcagcggaccctgaccgccgacgagcggaccaagctgatccaggccctggagcggagcggcgacctgaccttcgccatgatccgctccaagaagctgctggacctgaagaaaacccacaagcggaaggacaaaaagaccggcaagcaggtggtcacccccggctacgccttcaacctggaggagggcggggagaagaagatccccggggaccgcaccgccgccaagctggtgcccatcttcggggaccggtggttcgacttctccctgcggcagcaggagcagatcgtgcacgacctgctggagtaccagaaccccgacgccctggccacccgggccaaggacaagtgggccctgaccgacgagcaggccaacaccttctccaaggtgcggctggagcagggctacgcccgcttcagccgccgggccctgcagcgcctgatcccccacatggaggaggggctgcactacatgaccgcccagaaggacgagtaccccgagtccttcgaggtgcaggaaacccacgacctgctgccgcccgtgctggacgccatcaaggacctgcggaaccccgccgtgtgccgggccctgaccgagctgcggaccgtggtgaaccacgtgatcaagacctacgggatgcccacgatgatccgcctggagatggcccgggacctgaagcggccccggaagcagcgcgagcaggcctggaagcggaaccgggaccgccagtccgagcgccaggtggccgccgccaagatcaaggcggccaagctggtggtgggggagcccaaccgggacgccatcgagaagtggctcctggccgacgagtgcaactggctgtgcccctacaccggcaagaccatctccgccgaggccctgctgggcccccacccccagttcgacgtggagcacatcgtgcccttctccatcagcctggacaacaccttcatcaacaagaccctgtgcgacagccacttcaaccggcacaggaaggccaacaagctgcccaccgcctgctacgaccccgacgggcaggagtggcaggacaccctgagccgggtgcggcggttccgggggcaggcctccagcatcaagctggagcggttccagtggaccgaggtgcccgacgggttcaccaaccgggacctgcaggacacccggtacgccagccgcctggccggggagtacctggccctgctgtacggcgggatggtggacgccgacggcaagcggtgcatccaggtgagcgccgggggcgtgaccgccaagctgcgggacgtgtgggggatgaacggcatcctgaacgacggcgggatcaagacccgggacgaccaccggcaccacgccgtggacgccgtggccatcgccctcacgtcccccgccaccgtgaagatgctgagcgaggccgccaccaaggcccactccgccggccggcaccggttcgcccccgccaacgagccctggcccgacttcatcgacgacctgcgggacgccatcgacagcatcaacgtgtcccaccgggccgaccggcggatcagcggcccgctgcacgccgagacaaactactcccggcccatcagcgcccccgggggcaagctggtgacccggaagcgggtgcgcctggaccagctgaccgtgaagaacatcgagagcgacgccatcgtggacccctccgtgcgggacgccgtgcggaccaagtggcacgcgctgggccggggcaaccccaagcagatcttcgtggaccgcatcaaccacccctacatgcagacccaggacgggcggatcatccccatccacaaggtgcgcatcaccgtgaacgacaagccccggcagatcgggagcggcacccggaagcggtacgtgatctccgggaaggacagcctgcaccacacggtgatcgtgtccagccagctgaagaacggcgagaagtggcgggatgagcccgtggaccgcatggagatgcaccggcggctgagcgccagcccctgcgtgcccatgatccagaccgactgggggaccgaccggttcgtgatggccctgtgcaagggcgactgcatcgagatgaacgacaagaaccacaaccggtccctgttcatcgtgcggtccatcagcaaggcggacatcaccatccgcctgcacaccgacgcccgcaccgacgagcagatcaagctcgccggggagcggagcaagtaccgcatccgctccgccgacgagctgcggaagcggcgcgccgtgcgggtggtggtgggccccctgggcgacatccaccgggtgaagatcggccacgtgaagcggcccgccgccaccaagaaggccggccaggccaagaagaagaaggactacaaggacgacgacgacaagtaa

SEQ ID NO: 663 - DNA, 3360 bp, synthetic construct
  source 1..3360: mol_type = other DNA
atggccccaaagaagaagcggaaagtcatggccgccaagcagtccaagtaccggctggggctggacatgggcaccaacagcatcggctgggccgccgtgctgctggacgacagcggcgacccctgcggcctgctggacatgggggtgcggatcttccccgacgggctggaccgcaccggcgagtccagcaacgccgccacccggcggaaggcccggtccagccggcggacccggcagcggtacgtgaagcgccgggacgagttcatggccctgatggtgcagcacaacctgatgcccaccgatcaggccgagcagcggaagctggagactctgaacccctacgagctccgggccaaggccctgtgccccgagaagctgcccgcccaccacgtgggccgggcgctgttccacctgaaccagcaccggggcatcaacctgaaccgccggaccgagaacggcgacaaggagcgcggccccgccaagggggccgccaagaagctgcacgagtccatgaaggccgacagcttctccaccctggggcagttcctgtaccaccggcagtgcatcggggagcccgtgcgcttccggaaccagggcaccaccgagaagcccaagtacgagctgtaccccacccgccagatgatcctggacgagttcaacaagatctggaaggcccagacgccccaccaccccgacgtgatgaccgacaaggccaaggaggccctgtacaaggccatctccttccagatcgaccccgagtccccgccggtggggaagtgcaccctggaccccgccgtggaccccgaggacaaggacggcttccgctgcgcctgggcctaccccctggcccagcacttccgcatctggcaggaggtgcggaacctggaggtgcggctgccgggccaggccagccggcggctgtccaaggaggagggcgaccgcatcgccggccggctgctgaagcagaacaccgtgtccttcaacgggatgcggcagctgctgcggctgcccaccgacgcctacttcaacctggagagcccccggcgggagaagctgcagggcgacgagacagcccacaagctctccaagaaggagttcttcggggagagctggcggaagttccccctgcccaagcagacccagatcatcgactgcctgctgggcgagaacgacgaggacttcgtcgtgcagtggctggagcggcacaccggcctgaagcggaacgccgccgagcgggtgtccagcgccctgctgccccagggccactgccggctgggcctgcgggccatgaagaagatcctgccccacatgaaggaggagggcctggactacgcccaggccgccaaggccgcggggtacgacccccaggtgcccaccgacgagctgagccccaccggccggctgccctactacggggagcggctggggaaccacctgctgggcaccggcaaccccgacgaccaccccgagaagcggttcgggcggttccccaacccccgcgtgcacgtggggctggggcagctgcggcggatcgtgaacaccctgatctccgagtacggccggccccagcaggtggtggtcgagatgacccgggagctcagcctgtcccagaagcagcgggaggcccgcgagaaggagcagaccgccaaccagaagaagaacgacgcccggcggaagaagctccaggagtgcgggctgcctcccaaccaccgcaacatgctgcggctgcggctctgggaggagctgaaccccgaggacgccctcgaccgccggtgccccttcaccggcaagcccatccccatgtcccagctgttctccaagcaggtgcaggtggagcacctgatcccttggcaggacagctgggacgacagccccaccaacaaggtggtgtgcttcaccagcgccaaccaggccaaggggaagaacaccccctaccaggccttccacgaccaccccgactacgactgggacagcatcctgaagcgggccagcaagctgcccaccaacaagcggcggcggttcgagaaggacgccggcgagatgttcgcccggcagggcggcttcctggcccgccagctgtccgagacaggctggctggccaggatgagccgcgagtacctgaccgccatcgccagcgacgtctgggtgacccccggccggctgaccgggctgatccgctaccggctcggcctggaggacctgctgcccatcaagtgggccggcgacgccaagcagcggaacgaccaccgcaaccacgcggtggacgccctggtggtggccctgaccgacgacagcctgctgaacaggatgtccagggcctacgacgaggagcggtccaagatccgggtgcccctgccctggcaggggttccgggaggaggtggaggcctgcctggacaagctgatcgtgagccacaagcccgacttcgggaagcggcagtccgagggcaacaccaccgggcagctgcacaaggagacagcctacggcctgatcgagttccgggaggacgccccctccaaggtgatccaccgcaagccgctggccgacttcagcgagcgggacgtgcagaacgtgtggtcccccgagctgcggaaggtgctgaagctcgtgtgggacgacgtggagctggagctgaaggccgccggcgccgagcagaccgaccgcggcaagctgaagaaggccagcgacaagcggcggctggccgcccgcttcgcccagcgggtggccaccgggggcgtgatcgtgggccagaagctgcagtaccccaagcgggtgcgcgtgaagtccaacgtgcggcacctggccctgatcgagcacaaggactcccggggcgtggtgcacgagaagggctacgagctgaagtccaacgagttcgccgacgtgtggtggatgcgggacgacagctggcagatggtggtggtgcccaagttctacgccaaccaccccaacttcgacatcgaggacttccgccccaagaccgccaagggcgagcacaagggcaagcccgaccccaccgccaagcggctgatgcgcctgcacatcaacgacatgggggccctgggcaagggccccaacccccggatcgtgcgggtgcggaagatcaccgacgccacgaaggaccccttcgtggtgctggacgaccacaacgaggccaacgtgcccaaccgggtgggcaaggacatgcgggagaaccgctactacgcccacaacctgaaggaggagtgcttcaggatcgtgaaggtcgacgccatcggccgggtggactaccccgagcccttcaagcccaagcggcccgccgccaccaagaaggccggccaggccaagaagaagaaggactacaaggacgacgacgacaagtaa

SEQ ID NO: 664 - DNA, 4680 bp, synthetic construct
  source 1..4680: mol_type = other DNA
atggccccaaagaagaagcggaaagtcatgaagaacatcctgggcctggacatcgggaccaacagcgtgggcttcgccctcatcgaggagaacgagggccagtaccagcgcatcatcaaggccgggtcccggatcatccccatgggccaggacgagatctccgacttcaacaaggggaacaccgtgaccgccgccgcccagcggcggcagtaccggtccatgcggcgcaacaagatgcgccgcaagctgcggcgggagcggatccaccgcatgctgcacagctaccagatgctgcccgcccactacgacatgagcatcgggtgggacaagaacgacgccaagcactacgggcagttcctggaggggctggagcccaagctgccctggatcccgatcaacaagaaccagtccaagttcctgttcttcaaccgcttcgagaacatgctgcaggacttcaagcgggtgcaccccgacttcgacaccgagaacaagaagatccccctggactggaccatctactacctgcggaagatcgggctgacccagaagctcaccctggaggagctggcctgggtgatcctgcagttcaaccagaagcgggggtactaccagctgtccatggacgacgccaccgacgacgccaccaagaagcaggagatcaaggagctggaggtgctggacgtggaggacctggggatcaacaagggcaagcgggagtaccgggtggtgctgcccgagggcctggagcagatcgtcaagtccaaccagcccctgaactggaagggggagatccgcaccttcatcgtgacctggacggtggacgccgagggcaacaagcagaccgacaaggagggcaagatcaagtactccatcaagcagctggaccccgaggccgccgacgcccccttcgccctgatcaagcagtacaccgagatccagatcgaggacagcgggctgcacgtgggcgagtacatctacaacagcctgctgcacaaccccgagaagcccatcatcgggaagctggtggccaccatcgaccggcaccactaccgccgggagctggaggccatcctgcaggcccaggtggccttccaccccgagctgcaggaccacgccctgttcgacaaggccgtggaggagctgtaccccaacaacagctcccaccggctgagcctgcaggcccaccgcagcttcgtgaagttcgtggtggaggacatcgtgttctaccagcggcccctgaagtccaagaagtccaccatcagcaactgccccctggaggcccgggagtacatcgacaaggagacaggggagttcgtgaccgtgcccatcaagtgcatccccaagagccaccccctgtaccaggagttccgcctgtggcagttcgtgtacaacatccgcttcaagagcgtggagatcacctccaagaaggacagcgacgtgaccgcccagttcctgtccacccccgcccagtacgccacctacttcgactggctgaacaccaaggactccatcaaggggtcccagctgctggcctgccccagcttcaagctgaagcccaaggagcggaaggcctacgagtgcaactacctggaggacaagacctacccctgcaacaagaccgccgccctgtactacaagctgctgaagaaggccggcatcgacgtggaggtgctggaggagatcgagtccaactggatgaccaagctgtggcacatcctgtacagcgtgaccgacctggagcagcgcgagaaggccctggactcctacgcggagaagatgcagttctccgtggaggacaccagcaacttcgtgaccgtgttcaagcaggcccaggccggcgaggagggctacggggcctacagcgagaaggccatcaagaagctgctgaccctgatgcggaccgggtaccactgggacctgtccagcaacgacaaggtgctgagcgtggtggaggagtggctggagacaggggagtgccccaagtacaagaacctgagcgacaacctgcgggagcaggccaccagccaggtgaccagccggggcttcaaggaggtgaacgacttccagggggtgcccttctgggtggcctcctacatcctgtacgggcgccactccgaggccagcaacgccaagaagtggaagaacacccgggacctggacgtgttcctggccgagttcaagcagaacgacatgcggaaccccgtggtgcagaacatcgtgcgggaaaccctgctggtggtgcgcgacctgtggaaggcctacgaccacatcgacgagatccacgtcgagctgggccgggagatgaagaactccgccgacaagcggaaggccatgaccgcccggatcgaggagaacgagaacaagaacctgcgcatccggcggatgctgcaggagttccagaacgccagctacggcgtggagcaggtccgggcccacagccccatgcaggccgaggccctctccatctacgaggagggggccatcgccaacgggggcgagatgcccaaggaggtgttcgccatccacaagaagctggcggacagctccaaggtgcccaccgcctccgagttcatgcggtacaagctgtggctggaccagcggtaccagagcccctacacggggcagatcatccccctgagcaagctgttcacctccgcctacgagatcgagcacgtgatccccaagtcccggttctacgacgactccttcaccaacaaggtgatctgcgagtccgccgtgaacaaggacaaggacaacatgctggccatggagtacatccagagccggcaggggaaggagatcgcctgcggctccaagctggtgcccatcctgacccccgagcagtacgagcaccacatcaacgaggtgtacgggcgccggaaccggctgaaggccgagaagctgaccatcaccgagatccccgacagcttcatcgagcggcagctgaacgacacccggtacatctccaagtacgtgatggccctgctgagcaacatcgtgcgggaggacggggaggagacaagcaccagcaagaacctgatcccctgcaccgggggcatcaccacccggctgaagaaggactgggggctgaacgacatctggaacagcctgatcgcccccaggttccagcgcatgaacgagctggaaaagaccaacgcctacggcgagtaccgggaggtggacggcaagcggttcttccagatcaacatccccctggacatcgccaagggcttcaacaagaagcgcatcgaccaccggcaccacgccctggacgccatcatcgtggcctgcgccagccggcgccacgtgcagttcctgaactcccaggaggccaagtccaaccccaagaaccacgacgccctgaaggaggccctgatggtgtccaagggcaagggcaacggcaagggcctgcgcaccccctggcccacgttcaccaaggacgtgctggactgcctgcagaacatcgtgcccagcttcaagcacaaggcccgggtggtgtcccggggctccaactacaccgagtacatcgacgccaccggccgcaaggccaccaagaagcagaccaagggcgacctgtggaccgtgcggaagcccctgcacaaggagacaatctacgggcgggtgaaccgcctgatccaggaggagctgcccctgaagaaggccctggaccacatcgactggatcgtggacaaggagttcgccgccttcctgcaggagctggtggaccagaagaagaagcccgccgccatcgtcaagaccgtgaaggagcacgagaagtacgagcagtacgccgtggccgtgcccgtgaactactacagcgacgagctggaggacgagacaaagcacctggtggtggtgcggaagtccctgatcgacctgggggactccctgaagcggaactccatcgaggacgacatcatggacggcgccatccggcgcatcctgctgaaccacctcgacaagtacatggacggggacaccgaccaccccgagctggccttcagcgccgacggggtgaacgagctgaacaagcacatcatcgagctgaacggcggggtgttccaccaccccatcaacaaggtgcgggtgaccaccgtgaaggggcagcgcttcaaggtgtccgacgcctgcggcggctccaagcacgccgtggccgccagcgacaccaacctgttctacgccgtgtacctgaacgagaagaaggacaagcgggagtacgccacggtgccgttctacgaggccctgcggtgcaagcaggaggacctgcccgtggtgcccgagatcaacgagaacggcgccaagctgctgttcaccatcagccccaacgacctggtgtacatgcccgaggaggggcagtccctggaggacatcaagtccatcgaggacatcaacctgaacaacatctaccggttcgtgaacagcagcaccaaccgctccttctacatccccgccaccatcagcagcatgatcaaggagaaggtggagtacctgaaggccaacaagatcgagctggacgacgagaagatgtccatcaagacccactgctaccccctgcagaccgaccggctcgggaacatcatcgccatcaacaacatcaagctggacaagcggcccgccgccaccaagaaggccggccaggccaagaagaagaaggactacaaggacgacgacgacaagtaa

SEQ ID NO: 665 - DNA, 3336 bp, synthetic construct
  source 1..3336: mol_type = other DNA
atggccccaaagaagaagcggaaagtcatgaccaacgtcaaggacaagaagtaccggctggggctggacctgggcaccaacagcatcggctgggccgccgtgtccctggacgacaacgacgagccctgcggcgtgctgggcatgggcgtgcggatcttccccgacggccgcgacgcccagtccaagaccagcaacgccgtggaccggcggatggcccggggccagcgccggcggcgcgaccggtacctggagcgccgccgggacctgatggacgccctggtggagttcgggctgatgccccaggacgccgagcagcgcaaggacctgcagaccctggacccctacgccctgcgggccaaggccctggacgagcccctggagcccagcgagctcgccagggccctgttccacctgaaccagcggcggggcttcaagtccaaccgcaaggccgacaccgacgaggtggagggccggtccctgtccgagcggatcggggagctgcggcggcagatgcaggaaacctccgcccggaccctgggcgagttcctgtatcgccgccgcgtgaactccgagacagtgcgggcccggccggacctgcggctgtaccccgaccgggccatgtacctggaggagttctgcaagatccgggccgcccagaagccccaccagcccctgacccccgaccagtgggacaagctgaaggagatcatcttccaccagcggcccctggagcccgtggaccccggctggtgccagttcgagtacgagaacgacgagaagcgggccgccaaggccctgcccgtgttccaggagttccggatcctgcaggaggtgaacaacatccgggtgcgggtggggtcccagcccgagcgccggctggacgagcgcgagcggggcgccgtgctcgcccggctgcgctcgggcaaggacatcgacttcggcaagctgaccggcgacctgcggaagctgctggccgaggccgacttcaacctggccctgggcggccgggagaagatcaagggcgacgagacaaccgcccgcctggccagcagcccccagcccgccaagggcgacaagcccgccaagcccgggctgttcggcgacaagtggctgaacctgcccatcgaccggcggaacgagatcgtgaagttcctgctgaacaccgaggaccccgacaaggtgcgggagaaggccatccaggagtggggcctgaacaccgcccaggccgacgccgtggcccgggtgtccctggtggccggctacgggtccctgtccgagaaggccatcaacaagctgctgccccacctggagggcggcatgcggtacgacgaggccgtgaagaaggagtacaagcaccactccgacttccggaacgaggaggcccacgacagcctcccctactacggcaaggtgctgccccgggacgccgtgggggccaacagcaagaaggcccccgagatcgacggggaggtggcccggtacggccggttccccaaccccaccgtgcacatcggcctgaaccagctgcggcgggtggtgaaccggctgatcgaggcccacggcaagccccaggacgtggtggtggagctgacccgcgacctgaagctgaacccccagcagaagcgggacctgctgaagcagcagcgggagggcgggcagtccaacatccgcttcaccgagatgctgcagtccatggggcaggacgtgacccccaacgtcctgcgcaagctgcggctctgggaggagcagggcccgccccaggcgcgggtctgcccctacaccgggcgccggctgtcctgcgagatggtggtgtccgagcagaccgaggtggaccacatcctgccctacagccggaccctggacaacagccccagcaatatggtggtgtgcatcgccgccgccaaccgcttcaagggggaccggtcccccgacgaggccttctcctccaacccccagaactactcctaccaggagatcctggaccgggtggccaagttccccgacaacaagaagtggcggttccagccggacgccatgaagcggttcgaggaggacgaccgcttcctggaccggcagctgaacgaaaccagctacctgagccggaccgccaagaactacctggcctacctgtacgacgagaagggcgaggggcggacccgggtgcgggccgcccccggccggatgaccgccctgctgcggcggggctggtgcctggagggcatgctccgcaccagccccgagggcgagatcacccgcaagcagcgggacgaccaccggcaccacgccgtggacgccttcgtggtggcctgcaccacccagggcctgctgcagaagttcgcccgggccgccggcgccagccacaactcggaggagcggctggccgccctggccggggaaaccccgccctgggagggcttcgaccgcaacaagctgaagcccttcctgggcaagatcgtggtgtcctacaagcccgaccacgggacccggggcgccaagaccaagtccaccaccgggcagctccacaaggagactgcctacgggctggtggagttctccgagaacggccccagcaaggtggtgacccgcaagaagctggacgccgtgaagaagcggaaggacctggagtccgtgcgggactccgtgatgcgggacgccctgctgaagctgtgggacgacgtcgcccgggagggcggcgaggtcggcagcttcagcgaccgggccgccaaggagggcgtcctgctggagaagggccggcggcagaccgtgcgccgggtgcgggtcctggacaagcagaccgtgatccccatcaagcgggggaagggccaccccgaggtggggaagccctacaagggctacctgctgggcggcaacgcctgggccgacatgtggcagatgcccgacaagcagaaaacctggaagatggtggtggtgcccaccttccacgccaaccagcccggcttcaagctggagcagttccgcccccacgccgacgccaagaagctgttccgcatccagatcgacgacatgggcgccctcggcgacggcgccgagcggcgcatcgtgcgggtgcggaagatcaccaacgccaccagcggcgccttcgtggtgctggacgagcacaaccaggccaacgtggccgaccgcgtgggcaaggacatgaaggagaaccggtacagcgcccgccagctgaagcagctgggcttccgcaaggtgggcgtggacgagatcggccgggtgctggaccccggcccccggaaccccaagcggcccgccgccaccaagaaggccggccaggccaagaagaagaaggactacaaggacgacgacgacaagtaa

SEQ ID NO: 666 - DNA, 4167 bp, synthetic construct
  source 1..4167: mol_type = other DNA
atggccccaaagaagaagcggaaagtcatgtccaagatcctgggcctggacctggggaccaactccatcggctgggccgtggtggaaaccgacaacaacaagaccttctccctgaagaacaagggggtgcggatcttccaggagggcgtgaagatcgagaaggggatcgagggcagcaaggccgccgagcggaccggctaccggtccgctcggcggctgaagttccgccggaagctgcggaagatcgaggtgctgaaggccctgatcaagtacgacctgtgccctcacatctccgacgacgagctgatcaactggcgctacaagaagatctaccccaccaacaaggagttccggaactggtggctgaccgacaacaacgacaaccgggaggaccgcaagaagcagaccaagaacccctactacttccggagcaaggtggccaccgaccagctggacctgaccaaccaggaggaccggtacatcctggggcgggccttctaccacatggcccagcgccgggggttcctgtccaaccggctggagtccaccaagcagagcgagggggccgtgacccagaacatcaagcagatcaaccagcagaagggggacctgaccctgggccagtacttctaccagtgctactgcaacggggagaagatccggaaccagtacaccgaccggctggagcactacgagcaggagttcagccacatctgcaagctgcaggggatctccgacgagcagaagtccaccctgcacaaggccatcttctaccagcggcccctgaagtcccagaaggggctgatcgggaagtgccccttcgagcccaagaagtcccgggtggccatcagccacccggccttcgaggagtatcggatgctgtgcttcatcaacagcatcaagatcaagctccccgaggacgacaagctgcgcttcctgaccgagaaggagcgggagaaggtgatccccgtgttctatcggaagtccaagccccacttcgacttcgaggacgtggccaagcagctggcccccgccaagcagtacaagttctacaaggccaaggacaagaaccccgaggactacctgttcaacttcaacatgaaaaccaccgtgtccgggtgccccgtgagcgcccggctgaagtccatcttcggggacgagtggaaggagctgcagatcaagcacgagcggaaggaccacaccgactccatcatcgacatctacgacgtgtggcacgtgctgatgacctacgacagcgaggacaagctgttcgagttcgccaagtacaagctgtccctggacgaggacaagaccaaggagttcacccagttcaacctgccccaggggcacggctccctgagcctgaaggccatcaacaagatcctgcccttcctgcagctcggcctgatctactcccacgccgtgttcctggccaatatggtgaacgtgatcccgcccatcctgtggaacgaccccgagaacaagcagctgatcatcaacgagatcaagaagctgatccagtcccagaacgaggagaagcagatcacggacatcgtgaacggcctgatcaagatcaacaaggacagcaacgccgtgtggagctacgaggccgagaaggccttcaagaacgacctggtgaagaacatcaaggcctactacggcagctccaagtacgactccttctccaacgaccagaagtcccggatcgagacaaacgccttcgagctgctgaagatgcagatgcagaagaagaacggcgtgggcgagttcgccaaggtgaagcggatcgacgaccgcatcaagtccttcctgctggacaacttcgacggggacatcaagcccgagaacctgtaccaccccagcgccatcgagacattcaagcccgcccagaagaacaacgagaacaagtacctgctgggcagccccatcaccagcagcgtgcggaaccccatggccatgcgggccctgcaccagctgcggaagctgatcaaccagctgatcaacgacgacgtgatcgatgaggacaccatcatcaacatcgagatggcccgggacctgatgaacgccaacgagcggaaggccctgcagaactggcagcggcggcgggaggacgagcggaagaagtacgccgccgagatcgccaagcactacaaggccagcgggatcaacagcgagcccaacaacaccgacatcctgaagtaccagctgtgggaggagcagaaccacatctgcatctacaccggcaagaacatcgccctgcaccagttcctgggcagcaaccccgagttcgacatcgagcacaccatcccccagagcctgagcttcgacaacagccaggtgaacatcaccctgtgcgacagcaagtacaacaggacggtgaagcggaacaagatcccctacgagctgaacaaccccgacatcctgctgcggatccaccactggaagaaggagtacgagaacatcgacaaggagatccagaagtgcatcaagaacgcccggggcgcctccaccaaggaggacaaggaccggtacatcatccggcggcaccagctgaccacccagcggaactacatccgggagaagtaccagtccttcacccggaaggacgtgccctccgggttcaagaactcccagctggtcgacatcgggctgatcaccaagtacgcccggctgtacctcaagaccgtgttcgagcgggtgaacacggtcaaggggaccaccgtggccgacttccggaagctgtgggggctgcagaacgcctacgagacaaaggcccgggtgaaccacatccaccactgcatcgacgccatcaccatcagctgcatgaccaagccccagtacgacaagctggccaagttctaccacgactgggagtactccaaggaggagggcatggacaagaagcccgtgttcgagaagccctggcccaccttcaccgaggacgtcaagaccatcgagaacgagatcctgatctcccactacacccccgactccttcgccaagcagaccaagaagctgctgcggaagcgggggatcatccagaagggcaagaacggcaagcccatcgtgctgaagggggacaccgtgcggggcagcctgcacaaggagacattctacggggccatcgagcgcacccaggccaacaagaagggcgagctggagaaggtcatcaagtacgtggtgcggaagcaggtgagcgacctgtccgacgccgacgtgaagaacatcgtggacgaccgcatccgcgagatcgtgggcaacgcccgcaacgaggagaagaagatccagaaggagatcgagcggctgcggaagaagctgcagaaggccgaggagcacgaggagcccgccatcaagaacgacatctgcgtgctccagacggagatcgagcagctgtactccctgcccaacaagaagggcgcccccatccccatcaagaaggtgcggctgctgcagcccaccgtgaccaaccccctgtgcatcaagaagcagcgggacgtgaacaacaagaagcccaaggagtacaagcagaactactacgccgccaacgacggcaactacctgatggccatctacgaggggaaggacgccaagggcaagatcaagcgggacttcgagatcgtgaacaacatcaccgccggcgagttcttcaagcagagcgtgcagggcgacctgaagccccaggggatctccaccaacggcggcctgatccccaagcagaaggagaacggcaagctggtgctgccctacaagtccagcatcaagatcgggacgatgatcatcctgtgggagaagtctcccacagaggtgttcgacctggagctgaacgagatcaagcggcggctgtacaaggtggtggggctgtccgcccagaagctgaagatcagcggcaagagctacaactacgccaccatcgtgctgcggcaccaccaggaggccagcagcagcagcgacctcaagacctacgacggcgccttcaagcgggacgagacatacatggggcagcgcaagctgaaccacaaccagttcaacgccctggtggagaacatcgacttcgacatgaacaccaagggcaccatcaagtggatcaagcagaagcggcccgccgccaccaagaaggccggccaggccaagaagaagaaggactacaaggacgacgacgacaagtaa

SEQ ID NO: 667 - DNA, 3225 bp, synthetic construct
  source 1..3225: mol_type = other DNA
atggccccaaagaagaagcggaaagtcatgtctcggaagaagaacgagacatacgtgctgggcctggacctgggcaccgagagcatcgggtgggccctggtgaagaacaagaagggcaagcccgagagcatcctcaagtccggggcccacaccttcgacgccggggtcgagggcaacatcgagtccggcggcgacgagtcccgggccaaggcccggcgcgacgccaggctgccccggcggcagcactggcggcgggcctggcggcgccgcaagatcctgcggatcctgcagcgcaacggcatgatgcccgagttcgacaccagcagccccaccaacgtgcacgaggggctgctggccgtggactccaagctgcgcgagaagcacagcatcaacagccaccgggtgtccgcccacctgctgccctacatcctgcggaagaaggccctggaggagaagctgcccctgcacgacgtggggcgggccctgtaccacctggcccagcggcggggcttcctgtccaaccgcaaggccgggaaggccgacgacgacgagggcgtggtgaaggagggcatcagcgagctgcgccagaagatggaggccagccactcccccaccctgggggcctacttcgccaccctggaccccgaggaggagcggatccggaagcggtggacctcccggcagatgtaccaggacgagttctacgccatctgggccaagcagcagaagcaccacaaggccctgaccgacgagctgaagaaggagctgtacaacgccctgttcttccagcggcccctgaagtcccagaagcacctggtgggcaagtgcgagctgatccccggggccaagcacgcccccatcgccctgcggatcacccagcggttccggctgctgcaggccgtgaacaacctgtgggtgtacctgcccgacaacaccgagcggaccctgacccgggacgagcggaacaccctgatcgaggccctggagactcagggcgacctgagcttcgccgcgatcaggaagatgctgaagctgaagaagggcaccaccttcaacctggaggagggcggggagaagcggatccccgggaaccgcaccaacaccgccctcttcaagatcttcggcgaccggtggctgaagctcaccgagaacgagaaggacgccgtggtgcaggacctgatgtccttcgagaaggccgagcccctggcccgccggtcccggaacacctggaagctggacaagcaggccgccctggagctgagcgagctcagcctggaggagggctacgcccggcacagccggcgggccctggagatcctgacccccaggctggaggagggcctgccctacgccaccgccaagaaggacgagttccccgagtccttcgagtccaccgaccccctggacaccctgcccccggtgatcgagacagtgcccgacctgcggaaccccgcggtgtgccgggcgctgaccgagctgcggaaggtgatcaacgccatcatccgccgctacggcaagcccgagatcatccggatcgagctggcccgcaacctgaagcaggccaagaagaagcgggccgagatctccaagaagaaccggcagaacgagaagtccagggagaaggccaaggccaagatcctgaaggagctgaaggactccctgcccagccgcaccgacatccagaaggtgctgctggccgaggagtgcaactggatctgcccctacaccgggcggtccatcgacatgaagtccctgctggggaagaacccccagttcgacatcgagcacatcctgccgatgtccaagtccctggacaactcgtacgccaaccgcaccctgtgctaccacgaggagaaccgggaccgcaaggggaaccgcaccccctacgaggcctaccacgccaaccccgagaactgggagcagatcctggggcgggtgaagaagttctccggggacatggcccgggagaagctgcggcgcttccagatggaggagatgcccgagggcttcgccgcccgggccctgaacgacacccggtacatcagccggctggccggggactacctggccctgctgtacggcgggcggtccgacgccgacggcaagcagcggatccaggtgtccaccggcgggatcacccaccacctgcggaacgagtgggccatgaacagcatcctgaacgacggcggggagaagtccagggacgaccaccggcaccacgccgtggacgccatcgccatcgccctggcctcccccgccaccgtgaagcagctgtccgaggccgccgtgaaggcccagcagaacgggcggcggctgttcgcccccgtgcccgagccctggaaggacttcctggccgaggcccgcgacagcatcaaccgcatcaacgtgagcaagcgggcctcccggaagatcgcgggcatcctgcacgccgagacactgtacagcaagcccatgccctcccggaacggggagggcgtgcggcacatccggaaggagctgcacaagctcagcgtgacagagatcaaggggaacgccatcgtggaccccaccatccggcggctggtgcaggacaagttcacccagctgggcgagaacaagcccgacaaggtgttctccgaccccgacaaccaccccatcatcgtgtccagcgacgggcgcaccatccccatccacaaggtgcgcatcaaggccaaggtgaagccctggaagatcgggaagggccccaaggagcggtacgtgagcgccaaggccggcagcaaccaccacaccatcatcgtggcctccctggacaagagcaacaacgagatcaagtgggaggaccaccccgcctcccgcttcgacgtgcacatccggaagaacaacaaggaggagatcatcaagcggacctggaacaagggccagcggttccgcttctccatcacccccaacgactacatcatcatgaaggacagcaacggggaggagcagctgtaccgcgtggcctccatctccaagggggacatcgagttccggctgcacaacgacgcccggacgatggacaaggtgaaggccgccaagcagcgggtgcgggccggggccgagaagatgcggaagcacaacgcccggaaggtgcacgtgacctacctgggcgaggtgatccccgccaacgacaagcggcccgccgccaccaagaaggccggccaggccaagaagaagaaggactacaaggacgacgacgacaagtaa

SEQ ID NO: 668 - DNA, 3243 bp, synthetic construct
  source 1..3243: mol_type = other DNA
atggccccaaagaagaagcggaaagtcatgatgaaccactccgccgagacaaccctgggcatcgacctggggtccaactccgtggggtgggccctgacctcccccgacggcatcgtggccatggggagccggatcttcgccgagggggtgagcgccggcatcgagcagggccgggaggagtcccggggcgtggagcgccgggaggcccggcagctccggcgccagaccgaccgccgggtgcggcggctgtccaaggcctacaacctgctggccggcgccgggctgctgcccccggccgccaagtcccggcacctggccctgcagaacctggacgtggagctgggcaagcgccacgccagccaggagcccggggccgcccacaccctgatgtaccggctgcgggcccggggcctggaccagaagctggaggccgacgagctgggccgggccctgtacagcctggcccagcggcggggcttcaagtccaaccgcaagaccctggccaaggaggacgaggaggagggccaggtgaaggagggcatcgcccagctgcggaaggagatcgaggagtccggcgcccggaccctcggggagtactactccaagctggaccccgtgaaggccaagcagcgcatcagggcccggtggacccaccgggacatgttcgagggcgagttcgaccagctgtgcgccgcccagcagatgcaccacagcgaggtgctgaccgacgccttcgtggcccggctgcgggaggccctgttctaccagcggcccctgaagcccatcatgcccgggaagtgcgacctggaaaccagcgagtaccgggcccccatcgcccaccccctgaaccagcggatccggctggtgcaggtggtgaacaacctggagatcgtgccgcccaccgggctgggcgtgcccgagcccctgaccgacgaccagcgggacctgctgatcgagacactggagcgggacggcgacctgacgatggccgccgcccgcaagctgatcggcatcaaggggcgcgggtggaagttcaacctggaggagggcggcgagaagcggctggtggggaaccgcacctccagcaagatcgccgaggccatcggcgacgcctggaccctgctgcccctgggcgaccaggccaagctggtcgaggacctgctgtccgacaaggagagcgaggagctggaggagcacctgaaggggcggttcaccgccgcccaggccgcccggctggtgggcgtgcggatcgagcagggctacgccagcctgtccctgaaggccatccacaagctgatccccttcatcgaggccggggacaggtacggcgccgcccggcacgagctgtacggcgacatggaccgcaccggggtgcccctggacaagctgcctcccgcccgggagaagttcggcaacctgcggaaccccgccgtggagcgcagcctgtccgagctgcggaaggtggtcaacgccgtggtggccacctacgggaagcccgaccgcatccacctggaggtggcccgggacctgaagaaccccaagaagcggcgggaggagatctggaagcgccagcgcgccaaccagaagtcccgggagaaggccgccgccggcatcatcgccgagttccccaacttccagccgcggcgggacgacctccagaagcacctgctgtgggaggagtgcaacggcatctgcccctacacggggcggagcatctccctgaacgccctgttcggggacgatgcccagttcgagatcgagcacatcatcccccggagccggagcctggacaacagcttcaacaacaagaccctgtgcaccgtggaggccaaccgggacaaggggaaccgcaccccctacgagcacttctcccacgacgccgccgcctgggagcagatcctgcagcgggtgcggcggttccggggcgcctccgcctaccagaagctgcggcgcttcgagatgaaggaggtgaccaccgaggacttcctggagcggcagctgaacgacacccggtacgccagcaagctgagcgccgagttcgtggggctgctgtacggcggccggaacgccgacgggaagcagcgggtgcaggtgagccccgggctggccacctggcagctccggaacgagtggggcctgaactccatcctgaacgacggccccaccagcgacgggggccaggtgctcaagacccgggacgaccaccggcaccacgcggtggacgccctggtgatcgccctgaccaccaacgccaccgtgaagcagctggccgacgccgccgcctacggcgaccgggacagccggcgggagccctgctccccgccctggcccgacttcgtcgacagcgtgcggaagtccgtggacggcatcgtggtgagccaccgggtggaccgccgggtgcggcggaagatgcacaacgacaccttctacagcaagccctacgagcggaccgtgaagggcaagaccgtggaggtgcggcggtaccgcaagtggctccagaacctgtccaccaaggaggtggaggggatcgtggaccccgccgtccgggacgccgtgcgcaagaagctggaggagatcggggaccccaagaagttcgccgaggagagcaacctgcccaccctgccctcccggcggggcgacgccaccatcatccggagcgcccgcatcgagcgggtgcagtccgtgcaggccatcggcgagggggaccgccagcggttcgtggagctgggctccaaccaccacctggaggtgttcgccgtcctggacaaggacggcaacgaaaccaagtgggacgggcggctggtgtccacctacgaggccatgcagcggctgcgcgcccggcgccacggggaggagactcccctggtgcagcgggaccacggccccggcacccggttcaagttctccctgagctccggggagatgatcgagctggacgacgggggcggcgcccggctgtgcgtggcccgcaccatctcccagcagggggagaagaacgggcggcggcccgccccgatggtggagttcgtgagctccaccgactcccgcctgaagaaggggatcaagcaggccaacgcctggggcgccaaccccgtgaacaccctgcggaagttcgggtgccggaaggtggtgatcagccccgtgggggaggtcatcgaggcccacgacaagcggcccgccgccaccaagaaggccggccaggccaagaagaagaaggactacaaggacgacgacgacaagtaa

SEQ ID NO: 669 - DNA, 3339 bp, synthetic construct
  source 1..3339: mol_type = other DNA
atggccccaaagaagaagcggaaagtcatgaacaccgccaacgagaagtaccggctgggcctggacatgggcaccaacagcatcggctgggccgccgtgcggctggacgacgacggcgacccctgcggcctgctggacatgggggtgcgcatcttcagcgacggccgcaaccccaaggacgggtccagcaacgccgtgaagcggcggctgccccgcggccagcggcggcggcgggaccggtacctcaagcggcgggactccctgatgggcgccctgctggagtgcgggctgatgcccgacgacaagcgggagcgcaagaagctggaggcctgcgacccgtacgccctgcgggagcgggccctggacgagcccctgagcccctacgagctggggcgggccctgttccacctgtcccaccggcgggggttcaagtccaaccgcaaggccgggaacgaggacgagtccgaggccaaaaagacccgggccgagatcgacgccctgcgggcccagatcgacggctcgggggcccggaccctgggcgagttcatggccaagcggcactccaagggggagcccgtgcgggcccggcggggccagaacctgtaccccgaccgggccatgtacgagcgggagttcgacgccatcagggagcagcagaagccccaccaggggctgtccgccgagcagtgggagtggctgcggagcatcatcctgttccagcggccactccggccggtggaccccggctactgccagctggagactggcgagcggcgggcccccaaggccctgcccatcgcccaggagttccggatgctgcaggaggtgaacaacctgaagatccgggtgggcaccgagcccgagcggcggctggacgccaaggagcgggagcgggccctgacccggctgcgggccgggaaggacatcaagctgcgggagggcaaggacaaccggcccgccaagctgacccgggacctggacctgccctccggcgccgtgttcaacctggcccgcggcggccggaagtccgtggagggcgacaagaccgccgcccgcctgatgtccaagaaggagaagggcgagaaggagcaggagctgttcggggaccgctggcacgagttcagccccgccgagcggaacgacatcgccaagtccatgctgaaaaccgaggaccccgaggtggtgcagcggaaggccatggacgagtggggcctggacgaggcccaggccaaggccatctcccacgtgtccctgccccggggctacgggaacctgagcgagaaggccatcaccaagctgctgccccacctcgagaagggcctggtgtacagcgacgccgtgctggccgccgggtacccccaccacagcgacttccggaacgccgaggcccacggcaagctgccctactacggcgaggtgctggagcgggacgccgtgggggccgaccccaccaaggaccccgagaaggacggggagcccgcccggtacgggcggatcggcaaccccaccgtgcacatcggcctggggcagctgcggcgggtggtgaacgggctgatcgagtcctacgggaagcccgaggagatcgtggtggagctggcccgggacctgaagatgaaccgggagcagaagcagaactaccagcggcagcagcgcgagggcggggagcgcaaccagcgcttccgggaggacctgaagtccgccgagctgagcgtcacccccgaggccctgcgcaagctgcggctgtgggaggagcaggggccctgccaggcccggctgtgcccctacaccgggcggcccctgtccttcgagatggtggtgagctcccagaccgagatcgaccacatcctgcccttctcccggacctgggacgacagccccgccaacaaggtggtgtgcgtgcgggaggccaaccggtacaagggggaccggtccccctacgaggccttcggcaagtccagcgacggctacgactacgacaagatcctgacgtacgccgccaagctgcccgacaacaagcgctggcggttcgagcccgacgccatgaagcggttcgaggaggagggccgcttcctggaccgccagctgaacgagactcggtacctgagccgcaccgcccgcacctacctggcccacctgtacgacgaaaagaccgaggggtccgtgcgggtgcgggtggtgcccgggcacatgaccgccgtgctgcggcgggggtgggggctggagaacatgctccgggtggaccaggacggcgtgctgatcaagagcgagaagaagcagcgggacgaccaccggcaccacgccatcgacgccttcgtggtggccaacaccacccagggcctgctgcagcggttcgcccgggccgccggctccaacgacgacaccgaggagcggctggccgccgtggccgggagcgtggtgccctggaagggcttcgaccgcgaggacctgcggcccttcctgaacaggatggtggtgtcccacaagcccgaccacggcacccgcggcgtggacggcaagaccaccggccagctgcacaacgccaccgcctacggcctgatcgagtacagcgaggacgggccgtccaaggtggtggtgcggaagaagctgaccgacttcaagcgccgcgccgacctggagtccatccgggactccgccctgcggcaggagctgctggccctgtgggaccgggtgaagtccgagggcggcaagcccgccgacttcgccgagcgggccgccgacggggccgtgctgggcggccaccccgtgcggtccgcccgggtggtggagaacctgcgggtgatcgccatcaaggactccaacgggaacccctacaaggggtacaagctggacaacaacgagttcgccgacgtgtgggccatgcgcgacggcaactggaagatccgggtggtgagcaccttcgaggccaaccagcgggacttcgacatcgaggactcccgccccgtgacctcccgcgggaagcacaagggcaagcccgaccccgccgccaagtggctcatgcgcctgtacaagggcgacatgggcgccctggaggacggggcgggcgtgcgcatcgtgaaggtgcgcaagttctcctccgggagcgtgatcctggacgaccacaacgaggccaacgtggacggccgggagcgcaagggggagatcgaccgcaacatgtccatctacagcgccaagcagctccgcgagcagggcttccggaaggtgcgggtgaccgagatcgggcgggtgcgggacctgggccccctgaagcggcccgccgccaccaagaaggccggccaggccaagaagaagaaggactacaaggacgacgacgacaagtaa

SEQ ID NO: 670 - DNA, 3255 bp, synthetic construct
  source 1..3255: mol_type = other DNA
atggccccaaagaagaagcggaaagtcatgcgccagaaggcccccaagaagtgcgtgctggggctggacctgggcaccaacagcgtgggctgggccctgctggaggagggccgggacggccccgagcgcatcgtggacctgggcgtgcggatcttcgaggccggggtcgagggggacatcgagtccggcaaggacgagagccgggccaaggcccggcgggacgcccggctggtgcgccgccagaccgagcggcgcagccggcggcggcgcaagaccgcctgcctgctgcagcgccacgggctgctgcccaagggcgggctgaagcaggacagcagccgggacgccatcatcaagtccttcgacgccgacgtgtacctgaagtacgccgccgccgtgcggaagaagaagaaggacatcctgcagaccctggaccagctgccctacttcctgcgcgcccgggccctggacgagcccctggagcccttcgagctggggcgggccttctaccacctgtcccagcggcgggggttcctgagcaaccgcaaggcccccaccaaggacggggaggaggaggggcaggtgaagcagggcatcagcgagctggcccaggagatcgagcagtccggggcccggaccctgggcgagtacttcgccgggctcgacccccacgagcaccgcatccggaagcgctggaccgcccggacgatgtacgagcaggagttcgaggccatctggaccgcccaggccaagcaccacccgaagatcctgaccgccgccttcaagaagcagctctacaagagcatcttccggcagcggcccctgaagtcccagaaggggctggtgggccgctgcgagctggaggagggggcccggcgggccccctgggccagcttcatcgcccagcggttccggctgctgcagaaggtgaacgacctgaagatcgtggggcccgcccccttcttcgaggagcgggggctgagccccgaggagcggaccctgctgatcgacctgctggcccagaccggcgacgccgagttcaccaagatccggaaggagctgggcctggagcggggctccaccttcaacctggagcggggcggcgagaagaagctgaagggcgacaccaccaccgcccggctccggggcgtgttcggcgggcggtgggacgccctgaccgaggaccagaaggaggccgtgctgcacgacgtgtacagcatccagaacgagaaggccctggccagccggggcgtgcgggcctggaagctgagcaaggccgacgccgagaagctcagcaagaccgccatcgaggagggctactgctccctgagccggaaggccatcgagcggatgctgcccgagatggagcagggcgtgccctacgccaccgcccgcctgcacgcctaccccggccgggaccggtccatccccgtgggccggctgccctacatcgacgaccgcgacaacgtgaacatcgagctgcggaaccccgccgtgcaccgggtgctgtccgagactcggaaggtggtgaacgccatcctggacaagcacggcctgcccgggtgcatccggatcgagctggcccgggacctgaagaagtcccggtccgaccgggccgagatctggaagaagaaccggcagaacgagcagctgcgggagaaggcccgggccaagatcatcaaggaggccgtgatcccccagccctcccgcgaggacatcctgcgggtgcagctggccgaggagtgcgactggacctgtccctacaccgggaagcacatcagcatgaaggccctggtgggcaaggactcccagttcgacatcgagcacatcatcccctacagccggtgcctggacaacagcttcaccaacaagaccctgtgctaccacgaggagaaccgcaaccgcaagcagaacaagacgccccaggaggcctacaccccggacgagatggacgccatcgtggcccgggtgaagtccttcaagggcgaccggcgggccgtggccgccaagctggggcggttcctgaccaccagcctggacgccttcgacacgttcagcaaccggcagctgaacgacacccgctacgccagcaccctggccgcccagtacctgggcatgctgtacgggggccagatcgacgccaacgacacccggcggatccaggccggccgggggcaggtgaccagcgacctgcgcatggcctggggcctgaacggcatcctgggcgacgggggcaccaagacccgggacgaccaccggcaccacgccatcgacgccgtggccatcgccctgaccgacgccaagaccgtgaaggccctgtccaccgccaacagcaaggggtacgccgaggggcgccggaactggtggaagaacgtgccccagccctgggacggcttcctgaccgagctgaccgaggccgtgaacggcatcgtggtgtcccaccgggtgtcccggaaggtgaacgggcccatgcacgacgagacaaactacggcaagccctacatggacgacaaggacaagccttgctgccatgtgcggaagcccctggcctccctgtccgccaaccgcatcgacgacatcgtcgacccggtggtgcggcaggccgtgcgccgcaagctggaggagctgggcggggaccccgccaaggccttcaaggacgagcagaacctgccgtacctgaccacccacgacgggcgcaagatccccatccggaaggcccggatccgggtggtggccagcgccaagaccatcgggaagggctcccgggagcggcacgtgctgctcaacgccaaccaccacgccgagatcatcgagatcaccgacaagaaggggaacgccaagtgggacgacatcatcgtggaccgctacaccgccatgcggcggctgctgaagcacgagcccatcatccagcacgagcacggcgagggcaagcggttcgtgatgagcctgacccagggcgacgtcctgctgatcaaggacgacgacgacaacgagcagctcgtgatcgtgcggagcgtgtccaagaaggactactgcttcgtgcgcctgaccgaggcccggctgaagaaggacatcgtggccgccggcaagtgggtgcggttccagagcttcagcctgttccagagccgcttcatcaagaagctgcacctgacgcccctgggcgagatgcgcgacagcaacgacaagcggcccgccgccaccaagaaggccggccaggccaagaagaagaaggactacaaggacgacgacgacaagtaa

SEQ ID NO: 671 - DNA, 3270 bp, synthetic construct
  source 1..3270: mol_type = other DNA
atggccccaaagaagaagcggaaagtcatggggtcctacaccgtgctgggcctcgacctgggggcccagtccgtgggctggaccctgctggagtacaagaaggacaaccccgcccgcatcgtggacatgggcgcccggatcttcgaggccggcgtggagggggacctggagtccggcaaggaggagtccaagaccaccgaccgccgcgaggcccggctgcggcggcggcaggccgagcggcggtcccggcggatggagaacctggcctgcctgctgcggcggcacgggttcctgcccaagggcaagatccgctccggcaaggagcggcacgagctgctggccaagctggacaaggagatctacgacaagtaccgcaaggagctgggggaggacaacgactccctcgactccctgcggcagctgccctacttcctgcgggcccgggccctcgaccacaagctggccccctgcgagctgggccgggccctgtaccacctggcccagcggcgggggtacctgagcaaccgcaaggcccagcgcaacgactccgacaaggactccggcaaggtggagcccgccatccactccctgcgggagaagatggaggccgacggggtgcggaccctgggcgagtacctggccaagatcgaccccttcgaggagcagcggctccgccagcggtggaccgcccgctccatgtacaaggacgagttcgaggccatctgggccgcccagaagaagcaccaccgcaagaagctccacgacaccctgaagaaggaggtgtacaacgccatcttcttccagcggcccctgaagtcccagaagcggctgatcggggagtgcgacctggtggccaagaagaagcgggcccccaaggccctgctgctgagccagcggttccgctacctgcagaagctgaacgacctgcgggtgaccttccccgacggggtggagcgcgagctcaccgacgaggagcgcaacaccctgatccccctgttcgaggggcaggccaacgtgagcttcgccgccatgcggaagcccctgaagttccccaagaccgtggagttcaacttcgagaagtcggagaagaacctgcccgggaacgtgacccgggcccggctggagaagatcttcggggcccgctgggagaagctcgacgccgagtcccagaacaccatcgtgggggaggtgatgggggccctgaaccccgacaccctggccaagcggggcgagttctggggcctggaccccgaggccgccgccgagttcggcaaggtgcagctggagtccgggtacgtgaacctgtcccgcgaggccatgcgggagctgctgcccctgatggagcaggggatggccttccgcaccgccgtgaccgagcggtacggcgaccagtgggccaagacggccctggagaagctgcccccgctgatcgacgccgtgcccaccgtgcggaaccccgccgtgacccggaccctgaccgagatgcggaaggtgatcaacgccgtgatcgacaagcacggcaagcccacctacacccgcatcgagctggcccgcgagctgaagaagaacgccaaggcccgcaacgagatcttcaagaacaaccgcaagcggcggatggcccgggagacaatccgggagtccatccagaagcacaacggggacgccaacccctcccggcgggacatcgagcgggtgctgctgtggcaggagtgcaacgagtgctgcccctacaccgggaagaagatctccttcgccagcctgctgtcccccgagagcagctgggacatcgagcacatcatccccttcagccgctgcctggacgacagcttcttcaacaagaccctgtgctaccacgaggagaaccagcacgtgaagaagaaccagaccccctacgaggcctacgaggccaccgcccagtgggaggacatcctgtcccgggtgaagcagttcaagggggacgccgccaaggagaagctgaagcggttccagcagaccaacctggacgacttcgaggacttctccgcccggaagctgaacgacacccggtacgccagcaagctggccgcccagtacgtgagctggctgtacggggaggaggcccgcaagcgggtgcaggtgtccaccgggcagatcaccgcctacctgcggggcgcctggaagctgaaccagatcctgaacgacggggacaacagcaagacccgggccgaccaccggcaccacgccgtggacgccctggtggtggccctgatcgaccactccaccgtgaagcggctggccgacgccgccaagaagcagcagttcaagaacggccgctacaacgggttcaccaagcggttcgggcgggacgagccctgggagggcttcctggacgacgtgtaccacgccgtggacaacatcaccgtgtcccaccgggtgtcccgcaagatcagcggctgcctgcacgacgacaccatctacagccctccccaggaggacgagaagggcaaggagtacgtgaaggtgcggaagtacctgggggagaagttcggccccaaggagatccagaaggtggtggaccccgagatccagcggatcctgcagtcctggctggacgaccaccacggggactccaaggccgccttcgccgaccccgacaaccacccctacctgtacgtgcacaacgaggactcctcccgggggaagatccccatccacaaggtgcggatgaaggagtaccgggaggtgcagcagatcgggaaggaccaccggtcccgccacgtgtggccccgggccaacaaccacatcgagatcttcgccctgcacgacaaggacggcaacgtgaagaagtgggagggccgggtggtgtccaagctggacgtccaccagcggaagaagcagggcctgcccatcatcgaccgccactgggacaagcagcacaccttcctgttcagcctgacccagggcgacaccatcgaggtggacgtggagatctccaacgacgagacaatccgcgagctgtactacgtgcggggcatcagcaaccagctgacctgctcccacatcagcgacgcccggaagaagggggacatccccggcaagcagaccgagaacgaaaagacccggttcctgctgcggccatacgtgaccagcctgcagaagctgaactgcaaaaagaccagcatcagcccgctgggcgagatctacctggccaacgacaagcggcccgccgccaccaagaaggccggccaggccaagaagaagaaggactacaaggacgacgacgacaagtaa

SEQ ID NO: 672 - DNA, 4323 bp, synthetic construct
  source 1..4323: mol_type = other DNA
atggccccaaagaagaagcggaaagtcatgtccaacatcctgggcatcgacctggggaccaactccaccgggtgggccatccgggacaccgagatcgaggacaaccagatcgtggactacggggtgatcaccttcgacaagggggtggcctccgagaaggggaacgagttccccaaggtgcagaagcgcaccgagtcccggggcaagcggcggaactaccaggccgagaagtaccgcaagtgggagctgctgaagttcctgatcgagaaggggatgtgccccctgaccatcgacgagctgaacaactggaagaagtaccgcaagggggagcagcgcaagtacccccagagcgaggagtggatcaactggctgcggttcgacttcaacggggacggcaagcccgacttccacctgttcggcaaggacgagcacgagtcctactacatcttccgggccgccgtgctggacagcaacttcaagttcgtgtacgagaacaacccccagatcctggggcggatcttctaccagctggtgcagcaccgcggcttccggggccgggacgaggaggaggccaagacgatgctggagggctccaccaagaacggcaccgccggccgcaacgacatcgcctcctacatcgaccagcacaagaccctgggggccgccctgtaccactaccagaaggagaacggcggccggatccggcagcggtacaacctgcggaaggacttcgagtccgagctgcagcagatctgcgccttccacaacttctccgaggaggactacaagaagctgtggaaggccatcatctggcagcggcccctgcggacccagaagggcctggtggggaagtgcatctacgagaagaacaagaagcgggtgcagatctcccaccccctgtacgaggagtacaggacctggatcttcatcaacaacctgaagatcgtgccgcccaacggctacgacaaggaggcctacctgaaggagaagatctaccccctgttcctgcgggcctccaacgacttcaagctggaggccatcaggaagcagctgaccaaggacggggccatcatgctggcccacttcgccgacaagaccaaggtgatcagcgccaagctgctgaacgcctacagcaccctgctgggcgaggactggcgggagaacttcgggtggaacaccatcaacaaccgcgacaagcagccccagaagaaaaccaccgccaactactccttcgaggacatctggcacgtgctgaacaccttcgacggccaggagaacctgaagcagttcgccatcgagaagctgaacctcgacgaggagaaggccgagaagttcagcaagctgaagctgaacaacggctacgccaccctcagcctgtccgccatcaagaagatcctgcccttcctgcagaagggcttcctgtacagccaggccgtgtacatggccaacctgtacaaggtcctggggtccgagacaatctccgacgagctgatcgactacttcgccaacgaggtgaacgagatcatcgacggcaacaagaaggagaagctgcagaacaccatcgtgaacagcctggtgcaggacgagctgaactccgagcaccggttcagcatcgaggtggaccgggagctggacaacagcgagatccagcagatcaacgacaagatcatcgacatcatcggccagagctcctgggagaagaactactccgaggaggagcagcaggagctcctgaactacgtgacccacaagttcaaggagttcctgaagaagtccgtgctgagcaagcgcaacgtgttcatcgagcagcccaggctgcacgagcagatctggcagttcaccaagaccacctacaacgtgcccgacgagaacaagaagtacctgtggcaccccagcgagcaggacacctacgtgtccgccgacgactacgaggaggtgatgtactgcggcaagaccacctacatccccaagcgggagatcgagaagtacctgaagaagcacgacaacgccgagctggcctgccgcaccatcaagctgctgggctcccccgagcccatcagcaaggggttcaagaaccccatggccctgaagtccctgcacaagctgaagcacctgatcaactacctgctgcagaccgggaagatcgacgaggacacccggatcgtggtggagatcgcccgggagctgaacaacgccaacatgcgcaaggccatcgagcagtggaacgccaagcgcgagaaggagaacgacaactaccgcaaggagatcgcccagtacaacgacgagaagggcaccaagatcgacgagaacgatcggaacctgctgaagaagatccggctgtggcacgagcagaacaagcggtgcatctacaccgacaaccccatctccatcagcaacatcctgaacggggagaactacgacatcgagcacaccatccccgccagcatcagcttcgacagcgagctgaagaacctgaccctggccgacgtggacttcaaccgcaacgtgaaggggaagcagttccccagccagctggccaactacgacgtgatcctgaagaacatcgaggtgatcttcgggaagaaaaccgtgaagatcgaaaccgacaagaaggggaacaagaaggagtacaccacctggcagaagatcgaggatctggaggaccagatccaccagaagaacatcgcggtgaagtgcgccacctccgtgcacaccaacaacgggtactgcaagtgcaagaactgcgagatccagcggcggcacatcctgcagttcaacctgaagtacctgaaggacaagctgaacaccttcaccatcgacgagtacaaggccagctggcggaacagccagatccgggacacccagatcatcaccaagtacgccctgccctacctcaagaccgtgttcaagaaggtgagcgtggagaagggcagcatcaccaacgccttcaaggagatctacaaggtgaagctgaccgagggcaagaaggaccgcagcgtccacagccaccacgcccaggacgccgccatcctgaccctcatcccgcccttcttcgaccgggacaagatcctggagaagtacttccgggagaaggagatcgactaccggcggtgctaccacgagaagcccaaggactgggacaacttctccgccagctacatcctgggcatcgagaacaacgtgctcatcaacaacctgagcgagaacaagaccaccctgcccacctacaagatcgtgcggaagcggggcaagaagatctggctggacaaggagcagaacatcccgatgatcgcccagggggacaccatccgggggcagctgcacggcgagtccatctacggcgccatcaagctgcccctgcggaacgagaacaaccagatcctgttcgacgacgagggcaagatgctgctgagcgaggagcccatcctggtgatccggaaggacctgaagtacaagaaggacgccaacagcaccgggttcaagaccctgggcgagatcgagaacgccatcgtggacaaggacctgttcaaggtgatcaagcagcaggtggaggacgccaccgacttcaagaccgccctggagaacggcatctacatgctggacaagaacggcaacaaggtgaacaagatccggcggatccgctgcatcgagaagatgaagtacaacaccgccatcaaggtgcacgagcacaccaccaagtccgacaaggactacaagcggcacaccctcgccaagaacggcgagaacgccctgtgcctgttctacaagaacgagaagggcaaggccatgcagatcctgagcatctccgaggtggccgagctgcggtacaagaacgacaagcagtacttccacgagaacgacttcaaggagacactgaccgggcgggggaagaacaaggtgtccatccccctgtacgccgtgctgcggaacggctgcaaggtgctgttctacaagaacaccatcgaggagctgaacgacctgagccagtccgagctgtccaagcggctgtacaagatctaccagttcgagaaggaggtgcggaacaacagcatcaagtaccgcatgaagctgaagcaccacctggccgccggcatcgacaccgagctgaagaaggtccacaaggagtacagctccccggacttcgccctgaaccaggtgttcctgcggctgagcaagggccagtggaacttcgccatcgagggcaaggacttcgagatgaagctggacggcaccatcgagttcaaggacaagcggcccgccgccaccaagaaggccggccaggccaagaagaagaaggactacaaggacgacgacgacaagtaa

SEQ ID NO: 673 - DNA, 3240 bp, synthetic construct
  source 1..3240: mol_type = other DNA
atggccccaaagaagaagcggaaagtcatggtgtgcatgcccctggtgttcggcctggacatcggcaccaccagcgtggggttcgccgtgatcgagcacgactccgagctggccaccgggaagatccaccgcctgggcgtgcggatcttcccggaggcccgggaccccaagggggtccccctgaaccaggagcggcggcaggcccgcctgcggcggcggcagctgcgccgccgccgcgagcggcgccggctgctgggcgaccagctgcgggccgccggcctgctgccctcccggaactcccccgactgggaccgggtgatgaagcgggacccctacgacctgcggcgccgggccttcgagggggagacactgagcccccacgagatcggccgcgccatctaccacctggcccagcggcggcacttccggggccgggacatcgacgaggtgtccgacaccgccgacgacgccgccggcgacgccgatgagaagaaggccaccagcgccagggagcagaccgtgcaggccctgaagcgcgagggcaagaccctgggcgcctggctgagcgcccgggggccccacgagcgcaagcggggcgagcacgccacccgggacatcgtggaggacgagttcgacaccgtgtggatgcccctggtgcccgagcccttccgctccagcgtgcgcgacgccatcttcgtgcagcgccccgtgttctggcggctgaacaccctgggcaagtgccggttcgtgcccgacgccccgctgtgccccaagggctcctggctcagccagcagcgccgcatgctggagaagctgaacaacctggccctcgccgggggcaaccagcggcccctggaccccgaggagcgccaggccatcctgagccgcctgcaggtgcaggccagcatgacctggcccggcgtgcggcgcgccctggcccccgtgtaccgggcccggggcgagcccggggaggagcgggccctgaagttcaacctggaggagggcggcgagaagaagctgctgggcaaccccgtggaggccaagctggccgacatcttcgggtccgactggcaggagcacccccggaagcaggagatccgggactccctgccccggcgcacctggcaggccgactacgagcaggtgggcgaccagcgcgtggtcatcctgcccaaggccgagcgcaccacccggcgggccgaggtggtgcagaacttcgtggccgagttcggcctgtccaacgaccaggccgccaagatcgagactatgaagctgccctccggctgggagccctacagcatcgaggccctgcaggccatgctgccccacctggaggccggcgtgcgcttcggggagctggtgaacgggcccgaccgcgaggagtggcgggccaagaccttccccggccgggagcagcccaccggggaggtgttcgaccggctccccagccccgccgaccgggaggagcgcgagcacgtggcctccctgcgcaaccccaccgtggcccgcgcccgcaacgagctgcggaaggtggtcaacaacctgatcgacctgtacgggaagcccgacctgatccgggtcgaggtggcccgggacgtgggcaacagcaagcggcagcgggaggagaaggcctccggcatccgccgccaggagcggcggcggaaggccgcccgcgagactctgcagcagaacggcatcgccgagcccagccgggccgtggtggagaagtggatgctgtgggaggagtgcgggcaccgctgcccctacaccggggacaccatcagcttcgacgccctgttccggaccggggacttcgaggtggagcacatctggccccggtccctgtccctggacaactccttccggaacaagaccctgtgccggaaggacgtgaacctgcagaaggggaaccagaccccctacgagttcttccgctccaacgaggaggagtgggacgccctggccaaccggctggccgggatgaaggccgcccggggcggcaccgggatgagccccgggaagatccggcggttcctgacccccagcatccccgacggcttcgccgcccggcagctgaacgacaccggctacgccgcccgggaggccgtggcctacctgaagaagctgtggcccgaccaggggcccgaggcccccgtgaaggtgttcgccgtgagcggccgggtgaccggccacctgcggcggctgtggcgcctgaacaacatcctggccgacgacggcgagaaaacccgggccgaccaccggcaccacgccatcgacgccctgacggtggcctgctgccaccccgggatgacccagaagctgtcccggcactggcaggaggaggacgaccccagggccccgcagccccacctgcccccgccctgggagacaatccggcgggacgccaagtccgccgtggccgccatcgtggtgagccaccgggtgcggcgcaaggtgtccgggcagctgcacaaggagacaatctaccgggacaccggcgaggagatcgccggcgcccggggcaccacctaccggtacttcgtgcggcggaaggccgtggaggagctgaagaacagcgagtccgagcgcttcaacgggacccgcatcatcgacatcgtcgatgacggggcccgggacatcgtgcagatctgggtggacaagcacgggggcgaccccggcgccgccttcgtggacggctaccccaagcggggccggaagggccccgagatccgcaaggtgcgcctgcgggtgaagcagcagatcgagctgatgaccaaggccagcacggggtacgccgacctggggaacaaccaccacatcgccatctaccggctggccgacggcaccgtggactacgacgccgtgagcctgctggaggccagccggcggaaggcccgccacgagcccgtggtgcgccgcgagcggggcgacggcgcccagttcgtgatgtccctgagccccggggacaccctgcagacctccgagaacggggaggccaagctgcgggtggtgaccggggtgtggagcaacggccagatcgtgatgtgcgacaacctggacgccgccaaggccaccgagacacgccccggcgccaagaccatcgtgagcagcgatgggcgcaaggtgagcgtggaccccatcggccggatccggccggccaacgacaagcggcccgccgccaccaagaaggccggccaggccaagaagaagaaggactacaaggacgacgacgacaagtaa

SEQ ID NO: 674 - DNA, 4116 bp, synthetic construct
  source 1..4116: mol_type = other DNA
atggccccaaagaagaagcggaaagtcatggccaagatcctggggctggacctggggaccaacagcatcggctgggccgtgaccgagactgacgactaccagaacttcagcctcctggacaagggcgtgcgcatcttccaggagggcgtgaagatcgagaagggcgtcgagtccagcaaggccgccgagcggaccggcttcaggtccgcccggcggatcaagtaccgccggaagctgcggaagatcaacaccctggccgtgctggccaagtacggctactgccccgggatcgacaccgccgccctgcggaactggcggtacaagaagatctaccccagctccgagctgttccgcaactggcagaaaacggacgaggccacccagaagaacccctaccacttccgggccatcgccgcccagacccagctggacctgaccgacgagcacaaccggcagaagctgggccgggccttctaccacctggcccagcggcggggcttcctgtccaaccggctggaaaccaccaaggagaacaacggggcggtgatccaggccatcgacgagctgtccgaggccaaggcccagctgaccctgggccagtacttctaccagctgtacacccagaaggggaagatccggaagcactacacccaccgggagaagcactacctggaggagttcgagacaatctgccgggtgcagcagctgcccggggacttcaccagcgagctgcggaaggccatcttcttccagcggccgctgcggagccagaaggccctggtggggcactgccccttcgagaagaacaaggcccggtgccccatcagccacccggccttcgagcagttccggatgctggccttcatcaacagcatcaagatccagaccccgggcgacgagctgctgcgggccctctcccaggaggagaaaacccagatcgcgcccctgttctaccgcaagagcaaggagcacttcaacttcgaggagatcgccaagaagctgtgccccaagaacaccctgtacctctacttcaaggagaaggagaagcccgaggtgtgctaccagttcaactacagcatgaacagctccgtgagcgggtgccgcaccatcgcccagctgcgggagatcttcggcgaggactgggagaagtccatcaacgagcggtacaccctcaccaagcagaagaacggcaagaagtccagcgacgaggtgatcaacgacatctggcacgtgctgttcagcttcgacaagaccgagaagctgaaggagttcgccagcctgcggctggggctggagcagtccatggccgagaagttcgccgagatcaagctgaagcgggactacgccagcctgagcctgaaggccatccggaagatcaacccctacctgcaggagggcctgctgtacaaccacgccgtgttcctggccaagctggaggacctgatccccaggtccgtgtggtccgacgacgagaacaaggccctgatcaaggacgagatccggctgatcatcgagtcccagaactacgagaagcagatgaccgacctggtcaacggcatcgtgaagatcaaccgggacgaccaggcctcctggtccgagaacccctactggcaggaggccctgcagaacgacctgaacaagaagctggccagctactacggccagcggcggtgggacgagatgaacaccgacgacaaggacagcctgcgcaacgagctgttcatccgggtgaagaagcagatgcaggccaacctgggccgcggctccttcgccaagacccagaccatcgaggagcggatcaagaacttcatctccgaccagttcgagatcgacgagtcccagctggaggggatgtaccacccctccgccatcgaggtctaccgggaggcccggcggtccaacgacggcaactactacctggacagccccatgatctccgccgtgcggaaccccatggccatgcgcagcctgcaccagctgcgccgggtgatcaacgagctgctgaaggagggcaccatcgaccgggacaccaagatcaacatcgagatggcccgggacctgaagaacgccaacgagcggaaggccctgcagcggtggcagaaggcccgcgagaacgagcggaacgcctaccgggagcagctgaagaaggacatcctggccgccaccggcaaggagatcgagccctccgaccgggacctgctgaagtaccagctgtgggaggagcagaaccacatgtgcctctacaccggggcctacatcggcctcgccgagttcatcggcgacagcccgaagtacgacatcgagcacaccatcccccggtccctgtccttcgacaacagccaggagaacctgaccctgtgcgactcccggtacaaccgggaggtgaagcggaaccgcatccccagcgagctgcccgagcactcccagatcctggagcggctcaaggactgggagaaccgcatcgaggagactcagcggaacatcgacaaggccaagttccgctccaaggtgtccatcgagaagaaccgcaaggacaaggccatcgaggaccgccacttcttccagttcgagcacaactactggcaggggaagtacaagcggttcgtgatgaaggacgtgcccgagggcttcaagaactcccagctggtggacaccgggatcatcaccaagtacgcccggctgtacctcaagaccgtgttccggcaggtgaacacggtcaagggcaagaccgtggccgacttccgcaagctgtggggcatccaggacgagttcgagtccaaggagcggtccaaccacatccaccactgcatggacgccgtgacgatggcctgcatcagccaggacgcctaccagcgcctggccaaggcctaccacgactgggaggagaaccgccccatccagcggtccgacatgccccaggtggagaagccctggcccaccttcaccgaggagatcaagaagctggaggaggaggtgctggtgtcccactacacccccgacaacctgcccaaaaagaccaagaagatcctgcggatccgggggaagaagcagtacaacgagcagggcgagcccatctaccagcagggccacagcgtgcgggccagcctgcacaaggacacctgctacggcgccatcaagcagaccgcccccaacaagaaggggatcaccgaggagcagaccgtgtacgtggtgcgcaaggccgtggacagcctgaccgactccgacatccagaacatcgtggactgccggatccgcaccctggtggaggaggggaagaagcgggaggccgtgctgcggaaggagctggagaaggccgagaagcggctgcgggacgccgagctgcccgagatccaggagcagtggcagcacgaggtgcagtccctgcacgaggagatccggcggctctacgccatccccaaccacgacggctccttcacccccatcaagaaggtgcggtgcatcgcccgcaccgtgaccgacccggtgttccccaacaagaagcaccgggacgagcgcaagaagaagtccctgcagcagagccagaaggagtacaagcggttccgctactacgccaacgacggcaactacctgatcgccctgtaccagggcatcgacaacaagggcaagatccggcgggacttcatcgtgatcaacaacatgaccgccgccaagtacttcaacaacaacgacaacgagaacaccatccccgagatccaccccaagagcgggctgcccctgcagtacaccctcaagaccgggacgatgatcctggtgtggaaggactcccccgaggaggtgtggaagtccaacaagaaccccctgaccatccggctgtacaagctggtgaagttcgacaagagcggccggctgtacttccggccccacaccgaggcccggcccgccaacgagctgaaggaggagtacaccttcagcctggaccggttcgtggagcagctgtgcttcagcagctccaagttcaccgccctggtcgaggggtacgacttcaccatcagccccaccgggaagatcacccggctgaagaagcggcccgccgccaccaagaaggccggccaggccaagaagaagaaggactacaaggacgacgacgacaagtaa

SEQ ID NO: 675 - DNA, 5760 bp, synthetic construct
  source 1..5760: mol_type = other DNA
atggccccaaagaagaagcggaaagtcatgaagaacatcctgggcctggacctgggcaccaacagcatcggctgggccctgatcgagatcgaccacgagaacgggatcgtgcggatcctgggcctgggcgcccggatcctgcccatggacgccgacgagatcaacgacttccagtccaaggggaccatcaagtccaccaccgcccagcggaccgacgaccggggcgtgcggcggaacaaggagcggttcctgctgcggcgggaccgcctgcacctgatcctgaacctgctgaacgccctgcccgagcactacaagatcgagatcgacttcgagcgcaacggggagaagtgcggccagttcaagaactacaaggagcccaagctggcctacatccggaaccgcgccaacgacaagcggttcgacttcctgttcgaggactcctacaacgagatgctgaacgagttcggcgtggagtacaagaagcggaagctgatcccccgggactggaccctgtactacctgcggcagaaggccctcacccagaagatcgccctggaggagctggcctgggtgctgctgtcgtacaaccagaagcgggggtacgagaagaacgaggtggaggacaagacctccaaggagaacgagatcgtggaggtcctggacctccgcgtgaagaacgtgaccgagatcgtggacaaggagggcggcaagtacttcaaggtggagctgaactgcatcgacaacatcatctacaacgagtacagcgacatccagatgaccttcgagaacgacctgaaggagatcaaggtgatcaccaagatcgacgacagcggcaacaccaccagcaaggagttctccgtgctggacatcttctccctgaagatcaaggaggtgaactacgagaagcaggaggacaagcacaactacaccatcacctacctgaacgggtggaaggagatcaagaccctgaagaagtacaccttcaggtacaagaacgtgatcaacaagcccttcgagtacatcgtggagacagtgtacgacgagaagggcaacatcaagcccatcctgggcaagttccgcaagctgcgggagcccgacttcggggacaacagcaacgactggaccctgctgaagaaaaagaccgagaaggaggccctggcctacaacatcgagaacgggtacatcaacaagaacaccggggagcccaagaagtacctgagcccccagatcttccacatcctgaagaacgacgcccagagcggcaaccgcaccaagatcatcggcggcatgttccaggtgatcgagcgcgagttctaccgggaggagctggcccagatcatcagcacccagaagcagtactacaccaacctgaacgaccgcaagaccttcgagaagtgcgtgcagctgctgtaccccaacaacgaggcccacgccaagagcctgatggccaacaagaaggccatccagcagctgctgatcgaggacatcctgctgtaccagcggcccctgaagtccaagaagtccgagatcgccaactgcaagtacgagatccggcagtggaaggacgccatcgacaaaaagacgggcaagcccgtggaggagatcgacatcgagacaggggagatctgcatcaagaaggagcccatctaccacaaggtggtgtccaccagccacccctacttccaggagttccggatctgggacaagctgcacaacctgcggctgatccagatcgagaaggaggccgaggggaagatcaagaccaacgtggacgtgaccgacgactacttcaagaacgacacctaccagaagctgttccagctgctgaacaacaagtccaccctgaagcagtccgggctgctggacttcctgaagtccaagttcgaggagaagaacgagaacgccaagaacttcgtgtggaacctgcccgagaacgaggagatcaagggcaacgagacacgggtgtccttcaccatccgcttcaagcggtgcgggctgaaggactacaacaagctgctgaccaaggacaaggagatcgccctgtggcactacctgtacagcgtgagctacaaggagcggatcgccgacgacttcaagtccatcaagtccttcttcagcaagttcctggacggcgtggacatccccgacatcgtgaaggacaacctgatcaaggacttcgcgaactaccccaagttcgcgagcaagtactgcgcctactccgagaaggccctgaagaagctgctgcccttcatccggatcggcgagttcaacgactccttcgacatcaccgagttcagcagcgacctgaacgccatcaactacgacaagtcgatgatcctgtcctacatcaagtacaaccccatcgaccgcatgaagctgagccccaaggagtccatcgacctggagatcaagcggcggaacctgtacaaggccatctgggagcacagcatcaacgagcggatcaaggagatccgcaagcgcctggacaccatcgacttcgaggtggacgaggtggacttctccaaggtggtgtccaacgactccaacaacgggaacatccccttccccaaggggctgttcaacgccttcaaggccctcaagacctccgacaagcccaaggagttcaccaacctgaacctggcccaggccagctacctggtgtacggccggcacagcgagctggcccaggccaagtactggaccagccccaagcagatccgggacgagctgcaccaggagctgaagctgcacagcctgaacaaccccgtcgccgagcgggtgatcctggagatgatccagatcgtggccgacatctgggactactacggcgacgggaaggacaagttcttcagcgagatccacctggaggtggggcgcgacctgaagaagtccgccaaggagaagcagaacatcatcaactaccagaacgagaacaaggcgcagaacaagcgcctgcggcaggtgctggaggacttcctgtccaagtccccctacaacgccatcccccagaacagcgaccacttcgagcggctgaaggtgatggaggacggggccgcccacaccaagaacaccgacaagaacttcttcatcgagaagtcctacaccaagaaggagatcgacgagatcctgaagaagcccaacatcacccagggggacttcgacaagtacaagctctggatcgagcagggctacaagtccccctacaccaaccgcatcatcaagctgacggacctgttcaacgggaacaagtacaacatcgaccacgtgttcccccaggccagcgtgaccaacgacagcctgatcaacaaggtggtgtgcgagcgggagatcaacaccctgaagtccaagcagaccggccgggacttcatcaacaacccctcccagcggcgcatcagctgcgaggcccacaagaccaaggagaaccccaagggcatcgtggagatcgtgaacgacaacacctacgtgagcatcgtcaagacccagttcagcggccacaagcggcagatcctgctgagcaaggagatccccgccaacttcaccaacagccagctgaacaacgcccggcacatcgcccgcaaggcgatggagctgctgagccacatcgtgcgggagcccggcgaggtggagttccgcagcaagaacgtgctgcccgtgaccggcgaggtgacctccaagctgaagaaggcctggcggctggacgaggtctggcgggagctggtggccccgcggttcatgcggatgaacgagctcaccaagagcaacctgttcggccaggagcagatctccaagagcggggccaagtacttcgactgcaacatcgacaacagcatccgggagaaggaccccagctacgacatcaagcggatcgaccaccggcaccacgccctggacgccctgatcgtggccctgtgcaccgaggaccacgtgaactacatcaacaacatcaacgccaacgtgacctccgaggaccacaggaagcagaagcagatcgagaagtaccgggaaaccctgaagcggaagatcatgttctccaagcccaacaaggagaaccccaaggtgaaggactggttctacatgctgcccggccagcggcgggaggccgaggccgaaaccagcaccatcgacaccgtcctgcgcatcttcttctacttcaaggacaccggcttcaacatggactacaagtctatggtgctgagcgccctggagcacaccatcgtgacctacaagcagaacctgcgggtgatcaacaagaccgtgaaccggtacaacaacacccccaacaagaacaagttcgagatccagaaggacaaggaggccgacaaccagtacaactgggccatccggcgctccctggggaaggacacctactacggcaaggtgaacctgaagctgaaggagaagaacaagctccacagcatgctggaggccatcttcgagaacgtgaccatcatcgtggacaaggagctgaagaagcagatcatcgagatcaaggccaacagcaacctgaagcacttcaagaagaagatcaaggagctgtaccgggacaaccccaccttcgacttctactacttcaccgacaccaccaaggacagcaagaagatcgccagccgcgagttcctgtccgacaagttctacagcaagaagatcctggagatcaccgacaccgggatccagaagatcctgctgaaccacctgaagcagttcgacaccgtgaagctgcgcttcgaggaggccctgcagtacttcgacgccctgaaggagaagcccgagctggagtccatcctgaacaagggggactccaagttcaacaccctcgacgacctgatcaactacctgaagtcccacgagaacaagtacgacaaggtggactacagcgagctgaacgtgttcatcgagcaggtgcacgaccgcgacttccgggccgatgagactttcaaggacatcatcgacgagcaccccgagatcgccttctccgtggaccagatcgacctgatgaaccaggccgagaacatcaagaagctgaacgacgggaagaaccacgcccccatccggaaggtgcgcagcagccggggcttcgggaaccagcggcaggtcagcgacgacctgcagagcgtgaagtccaagcagtacatcgtgaacgacgccggctccaacctgtacctgggcttctacgagggggtgtacgaggacaacaagatcaccgagcggaagttccaggacatcgggctgatggagctgatcgagatcctgaagcaggacaagagcaagcggctcaaccccctgccccagtccatcctggacgagcggaagaacaccgagtacaactggctgttcaccctgagccccctggacctggtgttcgtgcccaacgaggaggagatcgagaaccccagcctggtgaacctgaacatcctgaacaaggagcagatcaagcgggtgtacaccctgaacaacttcaccgggggcgacatctacttctcccccaactcccacgccaagtccatccacgagaaggaggtggacctgaagttcgacaccaagacctccaagctgaaggggtccttccccgacaagaccacctccatctcctccggctccaagaccaaccagatcaagaacatctgctacaagctggaggtggacaagctggggaacatccccaagcccaacaagctgcggatcgacaagcggcccgccgccaccaagaaggccggccaggccaagaagaagaaggactacaaggacgacgacgacaagtaa

SEQ ID NO: 676 - DNA, 3291 bp, synthetic construct
  source 1..3291: mol_type = other DNA
atggccccaaagaagaagcggaaagtcatgcgggagcgcctgggcggcgccgacgccggcaagcgcagctaccggctgggcatcgacctgggcgccaactccctgggctggtccgtgatctggctggacgaggacaagcccaacgggctggggcccgccggcgtgcggatctacgccgacgggcgggacccccagtccaagacctccaacgccgtgacccggcgggtggcccggggcgcccgccggcggcgggaccggtacctggtccgccgcaaggccctgatggaggccctggtggccgccgggctgatgcccgccgacgcggccgccaggaaggccctggagcgcctggacccctacgacctgcgcgcccggggcctggacgaggccctggccctgacccacttcggccgggccctgttccacatcaaccagcggcggggcttcaagtccaaccgcaagaccgacgggcagaacgaggagaagggcgccatcgccgaggccggcaagcagctgcgcgagcagatgctggccgccggcgcccggaccctgggcgcctacctggcccggcggcacgcccggcgggaggccgtgcgggccaggaacgtgtccagcggcgccaaggccgcctacgacttctacccccagcgggccatgctggaggacgagttcgggcagctgtggcgggcccaggccaagtggcaccccgagctgacccaggccctgtacgaccagctgttcgagatcatcttctaccagcggcccctggtgagcccgcccgtcgggaagtgcgccctggaccccgccaagcagcccgacgacctggaggggttcaggtgcagctgggcccaccccctggcccagcgcttccgcatcctgcaggaggtgaacaacctggccgtgggcctggtgggggaggccaaggaggccctgtcccccgagcagcgccagaaggtgtacctgagcctgcgggccaagaagtccatgagcttcgacggcctgcggcggctgctcaagctcaccgccgagcagatcttcaacctggagagcgagaagcgctccaagctggagggcgaccagaccgcctggcggctggccgacaagaagcgcttcggcaaggcctggcacagctacgcccccgagcgccaggccgccatcgtggagcgcctgctggaggagcccgacgagcaggcgctggtggagtggctgatggccgagacaggcgtggaggaggcccgcgcctgggtgatcgccgactccccgctgcccgagtcccactgccggctggggctgcgggccctgaaggccctgctgcccctgatggaggccggcaagcgctaccacgaggccgccgccgaggcggggtacgaccacgcccggatgcccaccggggagatccgggaccggctgccctactacggcgagatcctgcaggaccacgtggtgggcagcggcgacagccgggaccccgccgagaagcggtggggccggctgcccaaccccaccgtgcacatcggcctgaaccagctgcggcgggtggtgaacgccctgatcaagcggcacgggccaccctcccaggtggtggtggagatggcccgggacttcaagctgagcccccaggccctgcggaagctggagctggagcaggccgccaaccagaagaagaacgaccggcggcgggagcagctggaggccctccggctgcccgtgaaccacgggaacctgctgaagctgcgcctgtgggaggagctgaacgagacagacgaggccgaccgcaagtgccccttcaccggggagacaatctccatccggcggctgctgtccgacgaggtggagatcgagcacctgatccccttctcccgcagctgggacgacagcgccgccaacaagaccgtgagcctgcggtccgccaaccgggccaaggggaacaagacccccttcgaggccttcggctcctcccccaccatcaacgggcgccactacgactgggagcagatcaccgcccgggccgccaacctgccggggaacaagcggtggaggttcgaccccgacgccctgcagcggttcgaggccggcggcgggttcctggcccgccagctgaacgaaaccagctggctggccaggctggcccgccagtacctggggtccgtgacggaccccaggcaggtgtgggtggtgcccggccggctgaccgccctgctgcggggcaagtgggggctgaacgacctgctgaacctggccggcggggtgaagaaccgcaacgaccaccggcaccacgccctggacgccctggtggccgggatgaccgaccggggcctgctgcagcgcatggcccgggagtacgacgaggtgcgggaccgcatcgaggtgtccgccccctgggtggggttccggcaggacgccgcccgggtgctggacgccatcctggtgtcccacaagcccgaccacggcgcccagggccagctgcacgaggacaccgcctacgggctgctggagccgcccgaggagggcggcaacctggtgtaccgcaaggccctgaaggacctgaacgagcgggagatcgggcggatccgggaccccgccctgcgctccgagctggagcacgccgtggccagcggcaaggccgccggcaaggccctgccggaggtgctgcaggccttcggcgtggcctgggggcagcggcacagccgcgccgcccccgggaaggagcacggggccctgcggcacgtgcggctgaccaaggtggagggcgccgactacctggtgtccatcgccgaccgggacgggcaggccttcaaggcctactccgccggggacaaccactgcgtggagatctacgagactcccgacggccggtgggagggcgaggccatcaccgtgttccaggccaaccgcggcgggtaccgggccgcctggcggaaggcccacccccaggcccggcccgtgatgcgggtgcacaagggcgactgcatccgcgtcgaaaccgaggccgggccggccttcctgatcgcccaccgcctggacgccgccgccaagcggttcaagctggccccgcacaacgaggccggcgccctggacaagcggcacaacgaccccgacgaccccttccgctggcgcatgttcagctacaacaagctgcggtccctgcaggccgcccgcgtgcggatcgacgaggtgggccggccctggcggcagaccgccaaggggcccggcagcaagcggcccgccgccaccaagaaggccggccaggccaagaagaagaaggactacaaggacgacgacgacaagtaa

SEQ ID NO: 677 - DNA, 3468 bp, synthetic construct
  source 1..3468: mol_type = other DNA
atggccccaaagaagaagcggaaagtcatggaggtgaagaagatggcccggcacctgaccaccctgggcatcgacctggggaccaactccctgggctggtgcctggtggagacaatcggggagccgggcgaggccggcgagggccggatcgtcgacatcggcgcccgcatcttctccgccgccgacatggccggccgggacgccaagtccaaggagtccctggccgtggcccggcggctgggccggaccacccggcgccagcgcgaccggcgcctgcgccggaagtcccggctgctggaccagctgaccgagttcgggctgatgcccgccgagaagcccgcccgcgagcggctggtccgggagactggcgacaaggagggcggcgacctgagcgcctccgtgtacgccctccgggccaaggccctggacgaggccctgaccccgcacgagctggggcgggtgctgttccagctgaaccagcggcggggcttcaagtccaaccgcaagaccgacggcaaggacaacgacgccggcaagatcgccgtgggggtgtcccggctgcaccgggccatggacaccgagcgggcccgcacctacggcgagttcctgcacaagcggcggctggccggcaagagcgtgcggacccgcctgcggcccgagtccatggccgagttcgacaacgaccccgaggccaagggcgacgggtacgacttctacagcgaccggtccgagctcgagaacgagttcgaccagatcaccgccgcccaggcctcctaccaccccaccatcctgaccagcgagcggatcgccgtgctgcgggacaccatcctgttccagcggaacctggtgcccccgaaggtggggaagtgcagctacaaccccgacgaaacccggctgcccaaggcccaccccctgttccagcagttccggctgtacaaggaggtgaacgagctggccctgatcggcgaggaccagaaccccgtgaagctgacccccgaccagcgggacaccctggtcctcaagctgcgcaaggccaagaaggccaagttcaccgccctgcggaagctgctgaagctggggcccgagttccgcttcaacaaggaaaccgacagccggaccgagctggagggggacgtcgtgtccgccgccctgtcccacaagaactgcttcggccccaactggaccgccaagtccatcgacgagcagtggggcatcgtggagcagctgcggggcgagcccgaccccgacgcgctgctgaagtggctgtccgacagctgcgggctggacgacgaccgcatcgaggccgtgatgaaggtgtccctgcccgagggctacggccggctggggcccagcgccctggccaacctgctggacgccctcaagcacgacaccgacgacaacggccgggtgatcacggaggccgccgccgccatcgagatctacgggcggaccaacgccgaggacgaccccgaccgcaaggccgtcaagaccctgcccaagtaccaggaggtgctgacccggcacatcccgccgggggaggggtccgtgtccgagcccccggacaacgacgaccccgggtacgaccggcacatgggccggatcaccaaccccaccgtgcacatcgcgctgaaccagctgcggcgggtggtgaacgccatcatccgcaagcacggccggcccgaccgcatcgccatcgagctgggccgggagctgaagctcaccgacaagatgcgggaggaggtgaaccgcaccatcgcccgcaacaccaaggaggccgaggcccgcagcgacaagctgcaggagctcggccagcccgacaccgggtacaaccgcctgcggctgaagctgtgggaggagctgaaccccgaccagcccctgaaccgggtgtgcatctactccggcaagcccatcagcatgcgggaggtgttcaccgccgaggtggacgtggaccacatcctgccctacagcaagaccctggacgacagccaggccaacaagctgctgtgcaaggcccgggccaaccgggtgaagcgcaaccgcgcccccgccgaggtgggggagtgggacgccgtgtacgacgacatcctggcccgcgccggcaacctccccaagaacaagcagtggcggttcgcccggaacgccatggaccggttcgccgacgagaacgggttcgcggcccggcagctgaccgacatgcagtacacctcccgcatggccctgtcctacctggccgtgctgtaccccgccgagcaggccaacatcgacggggtgccccggcggcacaaccacatccgggccctgcccggccggatgaccgagatgctgcggcggaagtgggccctgaacgagatcctgcacgaccacaacttcggggaccccgtcaagcccaagaaccgcaaggaccaccggcaccacgccatcgacgccttcgtgatcgcctgcaccagccggtccctgatccagcggatcgccgccgccgccgaggagatcgaggccgagggcagcgagaaggtgctgggccgggtgcccgagccctggcccggcttccgggacgagctgcggcagaaggtgctggggtccgtggtcagccacaagcaggaccacggcaccatctcccaggccgggtacgccagcgggaagggcaagaccgccgggaagctgcacaacgacaccgcctacggcctgaccggcgagacagacgagaagggcaacgagctggtggtgcaccgcatgcccctggacgacttcaagtcccccaagcacctgatggccatccgggacgagcagctgcgggacaccctgtgggaggccacccgggacctgtccgggaaggacttcaagaaggccctgcgggacatctcctcctccgaccggctgaacggctccgtgaacccctacaaggagctgcggcgggtgcgggtgctggagcccctccagatcatccccatccgcaaccggtcggggaaggtgtacaaggggtacaagggcaactccaaccaccggtacgacgtgtggcagctgccgggcggcaagtgggtggcggaggtggtgtccaccttcgacgcccaccagcccgggtggacctccaaggtgcgcggggacaaccccaccgccaagaaggtgctgtccctgcagcagaacgatatggtggccatcgagcgcgacaacggccgccagatctgccgggtggtgaagttcagctccgccgggcagctgaccctggccgagcacaacgaggccggggccctgaaggcccgggacgccgacaagaccgaccccttcaagtacgtgtacacctccggcaccgggctggggaagctgcgcgcccggcaggtccggatcgacgagatcggccaggtgttcgaccccggcccccactggaccgacaagaacaagcggcccgccgccaccaagaaggccggccaggccaagaagaagaaggactacaaggacgacgacgacaagtaa

SEQ ID NO: 678 - DNA, 3129 bp, synthetic construct
  source 1..3129: mol_type = other DNA
atggccccaaagaagaagcggaaagtcatgaagtccaccgtgctggggctggacctcggcaccaactccatcgggtgggccctgatggagcggaacgaggagaacaaccccgtgggcatcatcgactgcggggtgcggatcttccaggaggccgtggaggccaagacccgcacccccaagaacgtgaagcggcgggaggcccgggccgcccgccgcctcacccagcggcggacgatgcggaagcggaccctgaagaacgccctgatccgcatcgagctgctgcccgacaacatggaggagtgcgacaccatcctgcggaacaccgtggagtacgacccctacctgctgcgggcgcgcggcctggacgagaagctgacccccttcgagctgggccgcgccctgtaccacatgaaccagcgccggggcttcctgtccaacaggaagtccggcaagaagaaggacgaggggcccgtgaagcagtccatccagtacatcgagaagcagatggagcagtccgggtaccgcaccctgggggagtacctgttccaccaggaggagaagcggaaccggcggactgactccaagctgtcccagaagcagaccgagatcctgaccttcaccgcccggtccatgtacgagaaggagttcgacctgctctgggagagccagcggcacttctaccccgagcagctgaccgacgccaagaagaacaccatctacaagatcatcttcttccagcggccgctgcggatccagaagcacctgatcgggtactgccgcttcgagcccgggaagcaccgggccgccaaggccaccctgaccgcccagcggttccggatcctgcaggacgtgaacaacctgcagatcaagaacccgctgacccgcgagttccggcccctgaccgagcaggagcggagcatcaccctgcgggagctggacaagaccaagaagctggagtggaaaaccctccggcggaagctgggcatccacgagggcgagctgttcaacctggagaacggcggcaagccccacctgcccggcaacagcaccgccaccaccttccggggcgtgctgaagaaggagtgggaccagttctccgagaagcagcaggagcagctggtcaccgacatcctgaccatcgatgatgagaacgggttcctgaaccgcatgaaggaccactggaacttcagcgacgagatcgccaacaagctggccaccaccgagctggtgaacggctacgtggccctctcccagaaggccatgaagcggatcatccccttcctggagaaggggctgacctacgacaaggcctgcgaggaggtgggctacaaccacaccgaccagaagtccagcaagggccacctggagttcctggacagccctcccagcatccccaacccggtggtgcagaaggccctctgggaggtgcggaaggtgatgaacgccctgatccggaagtacgggaagcccgccctgatccggatcgagatggcccgcgagatgaagcagggcaagaagctgcgggacgccaccaacaagcggaaccgcgagatggagacataccacaagaagatcaaggagcggctgcagagcgagatgaacatgcagcagccgacccgggacgacatcctgaagtacaagctgtgggacgagtgcgggatgacctgcccctacacggggaagcccatcagcctgagcatgctgttcagccccgaggtggagatcgagcacatcatcccgtactcccgcagcctggacgacagctacatgaacaagaccctgtgcctgacccacgagaacaccaacgtgaagaagaacatgaccccctacgaggcctactcccacgacgagaagcgctaccgggagatcctgctgcggatcgacaaggaccacatgcccaagatgccctggcccaagcggaagctgttcgagaagaaggaggtggacaccgaccacttcatcaaccggcagctgaccgacacctcctacatctgcaacgaggtgaaggagtacgtgaagcggctgggcgtggacgtggacgtgaccaagggcggcgccaccgccggcctgcggatgcactggaacctgaacaccatcctggcccggcagcccggcgagactgccaaggagcggtccgaccaccggcaccacgccatcgacgccatcgtcaccaccctgaccacccggtccatgttccagttcctgagccggatcgccaagtccgccccctacatgggcgggctgtacgaccggcggttccagatcccgcccccgtacgagggcttccgggacgacgtgtactgccagatccagaagatcgtggtgagccacgccgcgtcccggaagatctccggggccctccacgaggagacagccctggggctggccggggagggcaagaagtccgggtacgtggagctggtgcaccgcatccccctgaacgggaacatcaccaagaaccagatcgaggccatccgggacgaccacgtgaaggccatcgtgaagcggcggctggccgagttcagcgacgaccccaagaaggccttcgcggacaccgtgttccacaaggacggcaagacccccatccacaccgtgcggatcaccgaggagaagtccatggacaccctgaccagcgtgaaggacaagtacgacatgccctacaagtacttcgccctgggcagcaaccaccacgtggagatcttcgagaacgaggagacagggaagcggaaggggatcttcgtgtccgtgatggaggccgcccggcgggtgcggatcgaccacacccccttgttcgaccgcagctacaaggaggggtggcgcttcgtgatgaccctgatgatcaacgatatggtcatcgtggacgtggacggcgagaaccgcatctaccgcgtccagaagatgaccggcgccggggccaagagcgagatgaccctgcgcgcccacaccgcctccaccctgacctacgacaacgagcggctgatcaagacccccaacaccctgcagtgcaagaagatcagcgtggaccccatcggccagatccgccggtgcaacgacaagcggcccgccgccaccaagaaggccggccaggccaagaagaagaaggactacaaggacgacgacgacaagtaa

SEQ ID NO: 679 - DNA, 3393 bp, synthetic construct
  source 1..3393: mol_type = other DNA
atggccccaaagaagaagcggaaagtcatggtggccgtgaacctgggccgccgcaccatcctggggctggacctgggggtgaccagcgtgggctgggccctgatcgagtacgacgggcagaagcccgtgaagatcctggccaccggggtgcggcacttcgacaccgccgccaccaacgccaaggacttcgccgccggcacccacaagaccaagaacgccgaccggcggcggccccagcgccacatgcggcggcagctgaaccgccgcaagcagcggaagaagcaggccttccaggccctgcaggccgccggcctgctgcccgctgccagcgccacctccgaggaccagcgccacaagatcatccgccaggtggacggccgcctgcggcggaagtggatggtgaagggcgaccaccgcaagcagcagctgctgccctacctgctgcgggacgccgccacccggcggcaggtgaccgccgaggagctgggccgggccctgtaccacctggcccagcgccgcggcttcaagtccaaccgcaagaccgaccgggacgaggacgacaagtccacggtgtacgagggcatcggcaccctggagtccgagctccaggccgccggctgcgagacttacggccagtacttcgccaccctggacccccagcggaacggctgccggatccgggggcggtacacctcccgccagcactacgagcgggagttcgacaagatcatcgacgcccagcggcccttccacccccagctggcccagcacgccaaggccatccggcgggccatcttcttccagaaccccctgaagtcccagcggcggttcctgggcagctgcgagctgtacgggaaccgccgccgggcccccaaggcctgcctggccttccagtgcttccggatctgccagcaggtgaacaacctgtccctggtgctgcccaacggctaccgccagcccctggcccccgaggagcgggaaaccctgtacaaggccctgcagggcaagcacaagctgacctcggccggggtgctgaaggagctggggttcaagcggaactccgggcacgccatccacgggatcggcgagtccgggaaggagatcatcggcaaccgcaccgcctgcgagctgcggggcgccctgggcgacgtgtgggacggcctgcgcgacgagcagcaggcccggctggtggacgagatcacccagttcaccaaccccgaggccctcgcccgccggctggccaaggagttcgggctctccctgcagcaggccacggccgccgcccgggcccggatcgagggcgactacgcctcctactcccgggtggccctgcaggagctgctgcccctgctgaaggccgggcggaccctgcccagcgccatcgaggaggtgtgcggccacagccggcggccccgggcccaggtggccaccgagcggggcggccggcacagccggaaccccgagacacccctgctgcccccgctcggggccacccggtgcggccgccacgtgcggaaccccgtggtgatccgctgcctgaccgagctgcggaaggtggtgaaccacatcctgcgggaccccgccctggggcggcccgacgagatccgcatcgagctgatgcgggacctgaagcggtcccgcaaggtgcgggaggcccgccaccgcaccatcaagaagaacaccgaccgcaacaagcagatcgagcacgagctgcagacccagcccgagacagagcggttcttccggaccgccccgccccggcggtccgacgtggacaagtggaagctctacgaggagtgccagggcatgtgcccctacaccgggcaggagatcagccccggggacctgtacgggcccaacccccagttcgacgtggagcacatcgtgcccgcctcccggttccccgacaacagcctggccaacaagaccctgtgcgagcacaaggagaaccgggagcggaagaagggccagaccccctgggaggcctaccacgagactgaccagtacgcccacatcctgcggcgcgtgaaggccttcaagggccccctgtccgcccggaagctggagctgttccagcggaaggagctgcccgcccagatgtccgcccagcagctggtggacagccagtactccgccgccctggcggccgagtacctgggcgaggtctacggcgggcaggtggacagcgccgggcggcggcgcgtgagcgcctccaacgggcgggtgaccgcccacctgcgggcgctgtggcgcctgaacgagatcctcggcagcgagagcgccgagaagaaccgggccgacctgcggcaccacgccgtggacgccctggtggtggccctgaccacccccggggccgtggccgccctggcccggttcgtccaggagggcgagagcctgggcctggacaacccgttcgccgcccggcaccggcggcgggccaagcccttcgacctgccctgggccgccttccgggaggaggccgagcgggagatcctgagcatcgtggtgtcccaccggcccgagcaccggctgcgggggcagctgcacaaggacacgatgtacggcgcccccggccggcgcggggccgaggaccccaaccggcccacccagcgggtcgccctgtgcgacctgtcccggaaggccatcgagggcaacgtgctggtgagccccctggtgcgccggtgcgtgctggagaagctgcggagcctcgaccagccgggcaagcccgccagccccgaggtgttcaaggacaccgccaacctgcccgagtaccccgggcggaacgggcagagcccccacatcatccggcgggtcaagacctaccggtccgcctccaagaccatccacgtgcggaacgggaaccccgggggccggtacgagcccggcggcaaccaccacgtgcccatcctggtggaggtggacgacgccgggcacgagaagcacgacggggagggccgctccctgctgagcttcgggaaggtggtgtcccggttcgacgccgtgcggcggctgacccaggacaacaccgaggtggtgaaccgggtgtacgaccccggcctgcggctgaagttcaccctgatgcggggcgacctggtggagatggccgacgacgacaaggtgcggcgcatctaccgcatgatgaacctgtccgacggggactaccggttccgggccgtgcacctggccgagggggacaacaactccctcaaggagcggcgcgacctgtaccagcggatccgctccaacaccgacttcagcaagcggttcccccgcaaggtgatcgtggaccccctgggccgcgtgcacaacagcgggggcaagcggcccgccgccaccaagaaggccggccaggccaagaagaagaaggactacaaggacgacgacgacaagtaa

SEQ ID NO: 680 - DNA, 4308 bp, synthetic construct
  source 1..4308: mol_type = other DNA
atggccccaaagaagaagcggaaagtcatgtccaacaactactacctggggctggactgcggcaccagctccatcggctgggccgtgaccgacgagacatacaacatccagaaggccaagggcaagagcctgtggggcatccggctgttcgagaacgccaagagcgccgaggagcgccgcgggttccgggccacccggcggaacacctaccgcacccgggcccggctggacctgctggacgagctgttcgagaacgagatcgacaagatcgacccccagttcttccagcggctgaaggacagcaagtactacttcgaggacaagaacaacatcaacgacaagaacaccctgttcaacgacaccaacttcaacgacatccacttccacaagaagtaccccaccatcttccacctgcggagcgagctgatccacagcaacaagaagcacgacatccgcctggtgtacctggccatccaccacatcctgaagaaccgggggcacttcatctacgaggggcagcagatcgagaacgtgcagaacgtggagaacctgttccagaacctgaagctgatcttcagcgacctgttccccgacatcaccatcagctaccccaacgggatcagcgagatcgagaacatcctgaccaacaagaccatcaacaacaagctgaaggagctgaagtacaacatcagcgtggacagcgacaacgagaagatcgccaagtccatccagaccgagatcaccaaggccctgaacggcaacaaggtgaacatcctgaagctgatccccatcaccaccctgtccgaggaggacctggagtacaaggacttcagcttcagctccagctcctacgaggaccaggagctggccatcaagaacaccctcggcctggacaacttcgagatcatctcctgcctgaaggagatctacgactgggccctgctgttcagcatcctgcagggcaagcactacatctccgacagcaagatccagacctacaacgagcacaagaagcagctgatcgagctgaagaagctgatcaagaagtactgtcccgagaagtactccgaggccttccactccaccaaggacaagctgttcaactacagcgcctacatcggccacggcctggacaacgggaagaagaacaagggcgagatcaagtccaagtgcaccatcgaggacgtgaacaagtacttcaagaagctgctggagaacgcccacaagaagtacaacgaggacaagctgctgaacgagatctacagcaagctggagacaaacagcctgctgcagaaggccatcaacagcgacaaccgggtgatcccctaccaggtgaacctgatcgagctggagacaatcctgaagaacgccaccaagtacctgaccttcctgaacgagaaggacaacgaggggtactccatcaacgagaagatcatcgccatcatgaagttccggatcccctactacgtggggcccctggtggagaaaaccaacgacaacaaggagtaccagaagttctcctggatgatccggaaggagaactccaccggcaagatcctgccgtggaagttcaccgaccaggtggacctggccgcctgcgggaacgagttcatcaagcggatggcccggaagtgcacgtacctgcccaacgagaacgtgctgcccaagaactccctgctgaacagcgagttcaccgtgctgaacgagatcaacaacctgaagatcaacggggagaagccctccctggacctgaagaacgagatcttcaacctgttcaagaacttcaagaccgtgtccaccaaccgcatcaaggacctgatcatctccaaggggatcttcaacaagcggacggagatcatcttctccgggatcgacaagaccttcaagtccagcctgagctcctacatcgacttcaaggagatcatcgagagcgagaagctctccatccccgagatcgagctgatcatcgagtgggccaccgtgttcagcgagggccagaagatcctgaaggagaagatcgaggagaacttcgagaacaagctcgacgagaaggacatcaagtacatcctgtccaagtgccgcgcctactccgggtgggggcacctgtcccgcaagttcctgaccgagatgtaccacatcgacgagtacggggagtgcaagaacatcatcaacctgatgaaggagacatccaacaacctgatggagctgatgtccatcaactacaccatcagcaagtccgtggaggaggagctgatgaactacaacaacgactacgacacctggagctacgagaacctgatcgccccgctcccggtgtccccgctgatcaagcggagcatctggcagaccatcaagatcgtgaacgagatccggcaggtgaccaagaaggaccccaagaagatcttcatcgagatggcccgcgggcccgaggagaaccagatcaaccagcggaccaactcccggaagaacaacctgatcttccagtacaagaacctcaccgagaacgaggaggccctgaacatcctgaagtccctggagaacaagtccgacgccgacctgcggaaggacaagctgtacctgtacttcacccagttcgggcggtgcatgtacagcaacgagaagatcaacctggacgacctgctgatctccaacaagtacgacatcgaccacatctacccccagaagaacatcaaggacgacagcctgaacaaccgggtgctcgtcctgaaggaggagaacgggaagaagtccgacaggtaccccctgtccatcgacatccagaacaagtgcaagagccactggaccttcctgtacaagaacaacctgatcaccaaggagaagtacaaccggctgatccgcaagaccaagctggacaactccgagctggagtccttcatcgcccgccagatcgtggagacacgccagagcaccaaggccatcgccaagctgctggagaagctgtgcccctccagcagcatcatctacagcaaggccaacagcgtggcccagttcaagaaggactaccacatctacaagtcccggagcgtgaacgacctgcaccacgccaaggacgcctacctgaacatcgtggtgggcaacgcctactacacgaagttcaccaaggaccccaagttcatcctgaagaacgagaacaaggacagctacaacatcagcaagctgttctactacgacatcaagcggaacaactactacgcctggcacatggacgtgaacgggaaggcccgccgggaggagaagaaccagaaggagaactcccaggacttcctgaagttccccgagactggcaccatcgtgcgggtccgggagactctgagcaagaacaacatcctgttcacccggcagaccttccagcgctccgggaagctgtccgacagcctgatcgtgaagaagggcgccaacaacgacgtgctgcccatcaagtccagcgacatcaagatgctggacgtggagaagtacggcggctacaacaagatcgccaaggcgtacttcttcatcgccgagtacaccaacaacaacaagcggatcaagcggttcttcgacatccccatctacaaggccagcgagatcgagaacggcaagaccaccctgtacgagtactgcatcaacatcctggagctgaaggaccccaagatcatcatccccaaggtgctgatcaacaccaagatcaagatcaacgacttcctgtacgagatctccggggccatgggggacgccatcggcctcaagaccgccatccccctgatcatcagcaacaagaactacaactactacttctacctggagaagtacctggagaagatgaagaactacctgcggttcaacaagaacatcagcgaggaggagctgaccagcttctccgagaaccagatgttcaagtacaagatcagctccgagaagaacctggagctgtacaacgagctgaacgacaagctgaagaacagcatcttcaagaacagggtgtccaacagcatcaagaacaacttcgaggagaacatcgacctgttcatcaactcctccatctacaaccaggccatcttcctggagcagttcatcaccctgttcgcctgcaagtacgggaacgtggacctgaccctgatcaagggggccaagaacagcgggacccccaagatcagccggaacatcaactccaacatcaccttcatctaccagagcatcaccggcatctacgagagccggaaggaggtgaagatcaagcggcccgccgccaccaagaaggccggccaggccaagaagaagaaggactacaaggacgacgacgacaagtaa

SEQ ID NO: 681 - DNA, 3372 bp, synthetic construct
  source 1..3372: mol_type = other DNA
atggccccaaagaagaagcggaaagtcatggcccgcatcctgggcctggacctggggaccaactccatcggctgggccctgatcgacgacaaggagaacaagatcatcaacaccggggtgcggatcttccaggagggcatcaaccgggacaccaagggcggcgagctctccaagaacgagactcgccgcaacgcccgccagctgcggaagcagtacttccgcaggagcctgcggaagaagctgctgctgaagatcctgaaggagaaccagatgtgccccatcgaggagaacgacttctccacctggatcaagatgaacccctacaagctgcgggccctggccatccacagcaagctgagcctgaccgagatcgggcggatcttcttccacatcgcccagcggcgggggttcaagtcctcccggaagtccgggaaggaggacgggaagatctactccgggctgaaggagagcgggaccatcgggatcgaccagacccaggagaacatcgccaaggggtaccacaccctgggcgagtacctggcgtccatcgaccccagcgaggagcgcctgcgcaaccgctacaccacccggcggatgtacgagcaggagttcgagctgatctgggacaagcaggcccagttccaccccaagaccttcacccacagcctgaaggacaagctggggtacgagaaggaggggatcatcttctaccagcggaagctgaagtcccagaaaaccaacatcgggaagtgcaccctggagcccaacaagcaccggtgccccatcagcacccccgtgtacgaggagttccgcacctggcagttcatcaacaccatccagtacgaccagaagcggctctccaacgacgagcgggaggtggcctcccagttcttcttcaacaaggccagcttcaagttcagcgagctgaagaagaagctgggcctgtccgagtacaacttcaactacgacgacgaccagaagatccccggcacctccaccatctccaccttccggaagctgttcaccaccaacatctgggaggccaagaccgacaaggagaaggacatcatctggcacatcttcttcagcgccgaggacaccgactggctggaggagtacgccaagaccaactggaacttcgaccagaaaacctcggccaagctgaagaacatcaacctcaagcaggactacagcaacctgtcccggaaggccatcaacaacatcctgcccttcctgaagaagggctacctgtacaacgacgccgtggtgctgggcggcatccgcaacgccatcggcggcgagaagttcgacgccctggaggaaaccgagtacaacatgatcatcgacggctacttcgccgccaagaagttcaagaacaaggagggcgagctgatcgagctcgtgaagaacttcctgatcgaccactaccacctgaacgacaaggccctgaagaagctgtaccaccacagccaggacaccgagtccatgctggtggtgtccaagctgcccgagcccgagaacctgcggaaccccatcgcccagcaggccatcttcgagctgcggaccctgatcaacaagctgatcgagaactacgggaagcccgacaccatcaacgtggagatggcccgggacctgaagtcctccaagaagcagcgggacgagtaccggttcaaccagcggcggaaccaggagaagaacgacgaggcccgggtggaggtggagaagttcggcctgaagccctcccggaacaacatccagaagtacctgctgtggaaggagctggaggccaagaacggcatcgccgtgtgcccctacaccggcaagaccatcaacgaggaggacgccctgggggagaacaacaagttccagatcgagcacatcatcccctacagcgtcagcctcgacgactccttcgccaacaagaccctgtgcgacgccaaggagaaccagaagaagggggacaagaccccctaccagttctacggcggggacaagaaggactggcagatgcggtccgagcgggccttcaagctgctgccctaccacaaggccaagaagttcgtgtccaccaaggagttccagctggacgacttcatccagcggcagctgaacgacacccggatcatctccaaggccgccaaggactacctgaagcagctgggggtgaaggtgtccgtgctgcccgggcagctcacctccgagctgcggtccaagtggggcctgaacaacatcctgaaccccgaggaggggaagaaaacccgggacgaccaccggcaccacgccatcgacgccctgaccgtggccgccaccaagcagtccttcctgcaggagatgtccaagtggaacaagtacaacaagtcctacgacctgaaggacttccccaagccctggaagtccttcttcgaggacacccagaccagcatcaacaacgtgctggtcagctaccacaagcagcaccgcaccatcaccaaggccaacaagaccatcaagaaggacggcaagaagtacaagtccagcggcatctccgcccggggccagctgcacaaggagactgtgtacgggcagcacctgagcagcaacggggagaagtactaccacgtgcggaagcccctgaacaccatcgacaacaaggccaaggtcgacaagatcgtggacccgatggtgcgcagcatcatcgagtccttcctgcgggggaagggcatcaacgtggacgagaagtacaagctggacaaggacatcttcttcaagatcaacgaggacaccgggcagaaggagacactgatctacctgcccaacaagaacgggtcccccatccccgtgaagaaggtgcggatcaaggagttcagcaccggcgccgtgaagctgaaggaccacatcaaccagtgggtggagcccgggaacaaccaccacatctccatctacaagaacggcgacgcctacgtggaggaggtggtgaccttctgggaggccgtggagcggaagaagcagggcctccccgtgatcaacaagacccccaagaacgggaacgagttcgagtgcagcctgcagatcaacgacctgttcctgctgaacatcaacgaggtggacatcaactgggagaagcccgaccagaactacctgtccaagttcctgtaccgggtgcagaagctgagcgccagctactacaccttccggcaccacctggccgccaccctggagtacaaggacgaggagatcaccatccagagcttcaaggcctggaagggccacaaccccctgaaggtgaagatcaaccacttcggggagatctcccggttcaagcggcccgccgccaccaagaaggccggccaggccaagaagaagaaggactacaaggacgacgacgacaagtaa

SEQ ID NO: 682 - DNA, 4167 bp, synthetic construct
  source 1..4167: mol_type = other DNA
atggccccaaagaagaagcggaaagtcatgtccaagatcctgggcctggacctgggcaccaactccatcggctgggccgtggtggagacagagaacaacaagaccttctccctgaagaacaagggggtgcggatcttccaggagggcgtgaagatcgagaagggcgtggagggctccaaggccgccgagcggaccggctaccggtccgctcggcggctgaagttccggcgcaagctccggaagatcgaggtcctgaaggccctgatcaagtacgacctgtgcccgcccatcagcggcgacgagctgaacatctggcggtacaagaagatctaccccaccaacaaggagttccgcaactggtggctgaccgacaacaacgacaaccgggccgaccgcaagaagcagaccaagaacccctactactaccggtccaaggtggccaccgaccagctggacctgaccaagcaggaggaccggtacatcctgggccgggccttctaccacatggcccagcggcgggggttcctgtccaaccgcctggagaacaccaaggagtccgacggggccgtgacccagaacatcaagcagatcaaccagcagaagggggacctgaccctgggccagtacttctaccagtgctactgcaagggcgagaagatccggaaccagtacaccgaccgcctggagcactacgagcaggagttcaaccacatctgcaagctgcagggggtcagcgacgagcagaagaacaccctgcacaaggccatcttctaccagcggcccctgaagtcccagaaggggctgatcggcaagtgccccttcgagcccaagaagtcccgggtggccatcagccacccggccttcgaggagtaccgcatgctgtgcttcgtgaacagcatcaagatcaagctgcccgaggacgacaagctgcggttcctgaccgagaaggagcgggagaagatcatccccgtgttctaccgcaagagcaagccccacttcgacttcgaggacatcgccaagcagctggcccccgccaagcagtacaagttctacaaggccaaggacaagaaccccgaggactacctgttcaacttcaacatgaaaaccaccgtgagcgggtgcccagtgtccgcccggctgaagtccatcttcggcgacgagtggaaggagctgcagatcaagcacgagcggaaggaccactccaagtccatcatcgacatctacgacgtgtggcacgtgctgatgacctacgacagcgaggacaagctgttcgagttcgccaagtgcaagctgggcctgggggaggacaagacgaaggagttcgtccagttcaacctcccccagggctacggctccctgagcctgaaggccatcaacaagatcctgcccttcctgcagatgggcctgatctacagccacgccgtgttcctggccaacatggccaacgtgatcccgcccatcctctggaacgacccagagaacaagcagctgatcatcaacgagatcaaggagctgatccagagccagaacgaggagaagcagatcaccgacatcgtgaacggcctgatcaagatcaacaaggacagcaacgccgtgtggtccaacgaggccgagaaggccttcaagaacgacctgctgcagaacatcaaggcctactacggcagcaccaagttcgacagcttctccatcgcccagaagtccagcatcgagactaacgccttcgagctgctcaagacccagatgcagaagaagaacggcgtgggcgagttcgccaaggtgaagcgcatcgacgagcgcatcaaggacttcctgatcgacaacttcaacgacgacatcaagcccgagaacctgtaccaccccagcgccatcgaaaccttcaagcccgcccagaagaacaacgaggacaagtacctgctggggagccccatcaccagcagcgtgcggaaccccatggccatgcgggccctgcaccagctgcggaagctgatcaaccagctgatcaacgacgacgtgatcgatgaggacaccatcatcaacatcgagatggcccgggacctgatgaacgccaacgagcggaaggcgctgcagaactggcagcgccgccgggaggacgagcggaagaagtacgccgccgagatcgtgaagcactacaaggcctccggcatcaacgccgagcccagcaacaacgacatcctgaagtaccagctgtgggaggagcagaaccacatctgcctgtacaccggcaagaacatcgccctgcaccagttcctgggcagcaaccccgagttcgacatcgagcacaccatcccccagagcctgagcttcgacaactcccaggtgaacatcaccctgtgcgacagcaagtacaaccgcaccgtgaagcggaacaagatcccctacgagctgaacaaccccgacatcctgctgcggatccaccactggaagaaggagtacgagaacatcgacaaggacatccagaagtgcatcaagaacgcccggggcgcctccaccaaggaggacaaggaccggcacatcatccgccggcaccagctgaccacccagcggaactacatccgggagaagtaccagagcttcacccggaaggacgtgcccagcggcttcaagaacagccagctggtggacatcgggctgatcaccaagtacgcccggctgtacctcaagaccgtgttcgaccgggtgaacacggtcaaggggaccaccgtggccgacttccggaagctgtggggcctgcagaacgcctacgagacaaaggcccgggtgaaccacatccaccactgcatcgacgccatcaccatcgcctgcatgaccaagccccagtacgacaagctggccaagttctaccacgactgggagtgcctgaaggaggagggcgtcgacaagaagcccgtgttcgagaagccctggcccaccttcaccgaggacgtgaaggggatcgagaacgagatcctgatctcccactacacccccgacagcttcgccaagcagagcaagaagctgctgcggaagcgggggatcatccagaaggacaagaacgggaaccccatcgtgctgaagggggacaccgtgcggggcagcctgcacaaggagacattctacggggccatcgagcgcacccaggccaacaagaagggcgagctggagaaggtgatcaagtacgtggtgcggaagaaggtgagcgacctgtccgacaccgacgtgaagaacatcgtggacgaccgcatccgggagatcgtgggcaacgcccgcaacgaggagaagaagatccagaaggagatcgagcggctgaagaaggacctgcagaaggccgaggagcacgaggagcccgccatcaacgacaagatctgcgtgctccagaccgagatcgagcagctgtacagcctgcccaacaagaagggcgtgcccatccccatcaagaaggtgcggctgctgcagcccagcgtgaccaaccccctctgcatcaagaagcagagggacgtgagcaccaagaagcccaaggagtacaagcagaactactacgccgccaacgacggcaactacctgatggccatctacgagggcaaggacgccaagggcaagatcaagcgggacttcgagatcgtgaacaacatcaccgccggcgagttcttcaagcagtccgtgcagggggacctgaagccccagggcatcagcaccaacggcgggctgatccccaagcagaaggagaacgggaagctggtgctgccctacaagagcagcatcaagatcgggacgatgatcatcctgtgggagaagtctcccacagaggtgttcgacctggagctgaacgagatcaagcggcggctctacaaggtcgtgggcctgagcgcccagaagctgaagatcagcggcaagtcctacaactacgccaccatcgtgctgcggcaccaccaggaggccagcagcagctccgatctcaagacctacgacggcgccttcaagcgcgacgagacatacatgggccagcggaagctgaaccacaaccagttcaacgccctggtggagaacatcgacttcgacatgaacaccaagggcaccatcaagtggatcaagcacaagcggcccgccgccaccaagaaggccggccaggccaagaagaagaaggactacaaggacgacgacgacaagtaa

SEQ ID NO: 683 - DNA, 4824 bp, synthetic construct
  source 1..4824: mol_type = other DNA
atggccccaaagaagaagcggaaagtcatggccaagatcctgggcctggacctgggcaccaacagcatcggctgggccgtggtggactccgacacccagaagatcctgaacaccggggtccggatcttccccgagggggtggagcccaagaccatcggccagggcgacaaggagcagtccaagaacgccacccggcgcgacaagcgccagatgcggcggcagttctaccgcaagcggctgcggaagatcaagctgctgcaggtgctcatccagcaggagatgtgccccctgaccatcgacgggctgagcaagtggaagaactggtcccggaccgagaaggccgagggccggaagttccccgacagcgagaagttcatcgactggatcaagctcaacccgtacgacctgcgggagaaggccctggaggaggagctgaccctgcacgagctggggcgcatcttctaccacctgatccagcggcggggcttcctgtccaaccgcaagggcacggaggactccaccatcttcaccaaggggaagcccgacgagaacatcctgcccatcaacgacaccaaggccaagatcggcaaccgcaccctgggcggctacctgaacagcatcgcctgcaaggacggggagccctacaagaacatcaccgacgagaacggcaaggagatccgggtgcggggccggtacaccgtgcgggacatgtacatcgacgagttcgagaagatctggagcgtccagaaggagttcctggagatcgacaacaagaaggtggaggccaagcgggcccgggagctgcgggggaccgtgaacaacaagcggaacaagaacaagatcgaccacctgaagatcaagttcggcgagtccaacgtggacatcaagatcgacgacaagggcaagaccaaggtgatcaccaccgagcacatctccctgaaggagttcctggccggccggatcgaccgcatcaaggacgaggccggcgaggaaaccctgcagttcaagtccaacgagtcggtgctgttctggcagcggcccctgcggagccagaaggggctgctgtccaactgccgcttcgaggacaacctgcccgtgatcaaggagaacggggacttcctgctgaagcccaacggcgagcggcagacccggggcaagaagccctgccccatctcccaccccgagttcgagctgttccgggcctaccagttcgtgaacaacatcagctacgggaagaaccagaagctgacccccgagcagaagaaggaggtgctggccctgatcaacaagaacgacgggaacttcgacttctccaagatcccggacgccctgaagctgaactacgagaagttcaactacggggacaagcagaaggtggccggcaaccccaccatcaaggccctgaagcccctgttcagcgacgacatctgggacaagcactacgaggagatctggcactgcttctacttctacgaggacaacgacaagctgttcgagaagctgaagaaggacttcggcttcaagaaggacatcgaggccgtgaagaaggtgcggatcaaggtgggctacagcaacgtgagcctgaaggccatccgcaacatcctgcccttcctggagaagggctaccagtacgaccgggccgtgatcctgggcggcgtgaagaacgccttcgggaagcggtgggagttcttcaaggagttccacgacaacatcgagaaggagatcctgtccatcctgcgggaggagaacaaggacggggaggccatcgagaagatcaaggagcacctggcctcccccgtgttcaactacggcttcgagaaggacgacccccacttcctgcacctgtaccaccacagccaggaggtggagaagcaggacgagctgaactccctggtgcccatcgtggagaacctccgcaaccccatcgtgcagcaggggctgaacgagactcggcgcctggtgaactacctggtgcagaagtaccagaaggagttcgggagcggcttccacttcgaccagatcaaggtggagatggggcgggagctgcggaacaacaaggacggccggcaggagatgtccttccggatccgcgagaacgaggccaagaacgacgacgcccggcagcggctggccgagtacggcctgcagcccagccgggagaacatccagaagtacctgatgttcaaggagatcgaggagcgctccggcaaggcccagtgcccctacaccggcaaggtgatctccgtgtccgacctgctgggccgggacaacgccgtgcagatcgagcacatcatccccttctccgtgagcctggacgacagcttcggcaacaagaccctgtgcgaggccaacttcaaccgggagaagtccgagaaaacgccctacctgttctacaaggagaaccccgaccccaacctgtggggcgtgacctcctgggaggccgtggaggagcgggccttccgcctgctgccctaccgcaaggccaagaagttcaccgccaagcgggagttcgagaagtccgacttcatccagcggcagctgaacgactcccgctacatcgccaagaagtccgtggagctgctgagccacatctgcaacgacgtgcgggtgatgcccggccagctgaccgcggagctccggcacctgtgggggctgaacaacatcctgcagcccgtgcagaacctgggcgagcacaccttcgacgtggacggcgagaacagcatcgcccactacgtggtgaccaacgagactggcgaggtggtgagcatccaccgcaagcagaacatccggcccagcaccaactccaacgagatcctggtgaccgggaacgtgaacaagaagaagttcacctccaagtacttcaagatcgacatggagactcccgacctgcccgacggcaagtactgggtgaagctgaacatcggggacaacctgcacgtgatccccaagtacatcgacaagcccgagatcgacgagaagtccatcgtgttcaagggcaacgtcgagaagggctacttcaagaacgacacctacggccggatcaaggccgacatcggcgacgggagctactgggccaagttcgagatcctgaacgtgaagttcgagactcccgtcaaggacaaccagcccaagatcaagcggaaccaggtgatgctgttcggcaacgtgctgaacggccagttcaagtgcttcatctaccagtgcgaaaccaacctgcgggacgggaagtactggatcatcctggacctgaaccccgccagcgtggagttcatccggagcgtgaaccccaagcccgaggtccaggtgaacgagctcctgatcacggccaccatcgacgaggacggcgtgctgaacgccgacatcgacaaggagtaccaggtgcagaccgactcccccaccgggaagtactacgtggtgatggacatcatcacccgggagcccaagctgtactccatcgagaacgagcccccgaagctggagaacggccagcagctgatcgagggcaacatctgggtggacaagtacaccggggagatcaagttcgaccccaagaagaaccgggacgaccaccggcaccacgccatcgacgccatcaccatcgccctgaccgagcagggctacctgcagcggctgagcacctacaacgcccagcggaaggagaagcagcggcagaagctggactccaccgagaagttccccgagccctggaacgggttcaccaacgacgtggcccgggccgccagcgccatcctgatctcccacaagaagaacaacaagaccctgaccaagaccaagaaggggttcggggtgcgcggccagctgcacgagcagaccctgtacggcaagaaggactactgcaagtccaaggagttcacctcccgggtgagcatcaagaagctgaagttcaaaaagaccaagggccaggccacgtacctggacgacatcatcgacgccgggatccagaacgccatctacaagaccatcaaggagaacctcaagaacgaggaggacaagcgcatcatcgaggacatcctgaagcgctaccacaacatcgggaacatcaagaccaagaaggcccaggagcaggaggccaaggagctgaacatcctgcggaccaagatcaactcccaggtggagaagatcctgcaggaggagaacttcttcctgaagaacgaggggaaccgctacaagaagctcaagaaggagagcatcgaggagcggcaccccgtgcccatcaagaaggtgaaggtgctgaaggtgctgggccacggcgggcacctgaaggagctgagctcctactccaagaagaagaaccgggtggtgaaggggaaccagtacgtgaaccccgggaacaaccaccacatcctgatctacctgaacagcgacggcaagctgtcccaggaggccatccagctgtgggccgtgatcgagcggaagtcccagggggacgagatctaccagctgcccgaggacggcgtgagcatcgtgaccaccctggagactaacgacatgttcatcctgggcctgagcaacgacgagttcgagtccaacatcaacaaccgggccttcctgtcccggtacctgtaccgggtgcagaacatctccgacatgtactacaacttccgcttccacctggccagcacgctggacaagaaggaggagtggatctacatccagtccctgtccgcctgggagaagctgaaccccatcaaggtgaagatcgacatcctgggcaacatcaagaaggtgaagcggcccgccgccaccaagaaggccggccaggccaagaagaagaaggactacaaggacgacgacgacaagtaa

SEQ ID NO: 684 - protein, 4650 aa, synthetic construct
ATGGCCCCAAAGAAGAAGCGGAAAGTCATGTCCAAGATCCTGGGCCTGGACCTGGGGACCAACTCCATCGGCTGGGCCGTGGTGGACAGCGACCTGCAGAAGATCCTGGACACCGGCGTCCGGATCTTCCCCGAGGGCGTGATCGACAAGGGCAAGGGCGAGAAGGAGAAGTCCAAGAACTCCAGCCGCACCGACAAGCGGCAGATGCGGCGGCAGTTCTACCGCAAGCGCCTGCGGAAGATCAAGCTGCTGCAGGTGCTGATCGAGCAGCAGATGTGCCCCCTGAAGGTGGAGGAGCTGGCCAAGTGGAAGAACTGGGACCGCACCAAGAAAACCGAGGGCCGGAAGTTCCCCAGCTCCGAGGAGTTCGACAGCTGGATCAAGCTGAACCCCTACGAGCTGCGGGAGAAGGCCCTCAACGAGAAGCTGACCCTCTACGAGCTGGGGCGCATCTTCTACCACTTCATCCAGCGCCGCGGGTTCCTGTCCAACCGCAAGGGCAACAACGAGTCCACCATCTTCACCAAGGGCAAGCCCGACGAGAACATCCTGCCCATCAACGAGACAAAGGAGAAGATCGCCAACCAGAGCCTGGGCAAGTACCTGAAGTCCATCAGCTACAACGACGGGGTGCCCTACAAGACCATCACCGACGAGAGCGGGAAGGAGGTGCGGGTGCGGGGCCGGTACACCGTGCGGGACATGTACATCGACGAGTTCGAGAAGATCTGGAAGGTGCAGTCCCAGTTCCTGGAGCTGAACAAGAAGGAGGTGAAGGCCACCCGGATCCGGGAGCTGAAGGGCGCCCTGACCGGGAAGCGGAACCAGAACAAGATCGAGTACATCAAGAAGAAGTTCGGCGACAAGAACGTGGAGATCCGGACCGCCAGCCGGGGGATCACCAAGCTGGTGACCGTGGAGCGGCTGTCCCTGAAGGAGTTCCTGGCCGGGAAGATCGAGGAGGTGCAGAACGAGAAGGGCGAGAAGAAGCTCGTGTTCAAGAGCAACGAGAGCGTGCTGTTCTGGCAGCGCCCCCTGCGCAGCCAGAAGGGCCTGCTGGCCAACTGCCGCTTCGAGGACAACCTGCCCGTGATCAAGGAGAACGGGCGGTTCCTGCTGAAGCAGAACGGGGAGATCCAGACCCGGTCCAAGAAGCCTTGCCCCATCTCGCACCCCGAGTTCGAGCTGTTCCGCGCCTACCAGTTCATCAACAACATCTACTACGGGAAGCACAACAAGCTGACCACCGAGCAGAAGGAGAAGGTGCTGGACCTGATCAACAAGAACGACAAGAACTTCGACTTCAGCAAGATCCCCGACGTGCTGAAGCTGACCTACGAGAAGTTCAACTACGGCGACAAGCAGAAGGTCGCCGGGAACCCCACCATCCGGGCCCTGAAGCCCCTGTTCGAGAAGGAGGTGTGGGACAAGTCCTACGAGGAGATCTGGCACTGCTTCTACTTCTACGAGGACGACGACAAGCTCCTCGAGAAGCTGAAGCGGGACTTCAACTTCAAGAAGGACATCGCCACCCTGTGCAAGATCAAGCTGAAGGAGGGCTACGCCAACGTGAGCCTGAAGGCCATCCGGAACATCCTGCCCTTCCTGAAGAAGGGCTACCAGTTCGACAAGGCCGTGATCATCGGCGGCGTGAAGAACGCCTTCGGGCGGCGGTGGGAGTACTTCAAGAAGTTCCACGACGACATCGAGAAGGAGATCCTGTCCATCCTGCGGGAGGACAACAAGGAGGGGGAGGCCATCGAGAAGATCAAGGAGCACCTGGCCTCCCCCGTGTTCTCCTACGGGTTCGCCAAGAACGACCCCCACTTCCTGCACCTGTACCACCACAGCCAGGAGGTGGAGAAGCAGGAGGACCTGAGCTCCCAGCTGCCCGAGGTGGAGAACCTGCGGAACCCCATCGTGCAGCAGGGGCTGCACGAGACTCGGCGGCTGGTGAACTTCCTGATGAAGAAGTACCAGAAGGAGTTCGGCAAGGACTTCTACTTCGACCAGATCAAGGTGGAGATGGGGCGGGACCTGCGGAACAACAAGGACGGCCGGCAGGAGATGGGCTTCCGGATCCGGGAGAACGAGGCCAAGAACGAGGAGGCCCGGGAGCGGCTGGCCGAGTACGGCCTGCAGCCCTCCCGGCAGAACATCCAGAAGTACCTGATGTTCAAGGAGATCGAGGACCGGGCCGGCAAGGCCCAGTGCCCCTACACCGGCAAGGTGATCTCGATCTCCAACCTGCTGGGCAACAACAACGCCATCCAGATCGAGCACATCATCCCCTTCTCGATCTCCCTGGACGACTCCTTCGGGAACAAGACCCTGTGCGAGGCCAACTTCAACAGGGAGAAGTCCGAAAAGACGCCCTACCAGTTCTACAAGGAGAACCCCGACTCCGACCTGTGGGGCGTGTCCAGCTGGGAGGCCGTGGAGGAGCGGGCCTTCCGGCTGCTGCCCTACAGGAAGGCCAAGAAGTTCACCACCAAGCAGGAGTTCGAGAAGTCGGACTTCATCCAGCGGCAGCTGAACGACAGCCGCTACATCGCCAAGAAGTCCGTGGAGCTGCTGAGCCACGTGTGCAAGGACGTGCGCGTGATGCCCGGCCAGCTGACCGCGGAGCTGCGGCACCTGTGGGGGCTGAACAACATCCTGCAGCCCGTGCAGAACCTGGACAAGCACTCCTACGACGTGGACGACAAGTTCAGCATCCCCCACTACGTGGTGACCAACAACAACGGGGACGTGATCTCCATCCACCGCAAGCAGAACGAGCGGCCCGAAACCCGCGCCAACGAGATCCTGGCCACCGGCTACGTGGACAAGCAGAAGTTCACGAGCAAGTACTTCAAGATCGACATGGAGACTCCCGACCTGCCCAACGGGAAGTACTGGGCCAAGCTGAACGTGTCCAAGAGCATCCGGGTGATCCCCAAGTTCGTGGACCGGCCCGAGACAGACGAGAACAGCATCGTGTTCAAGGGCAAGATCGAGAAGGGCTTCTTCAAGAACGACGCCTACGGCCGGGTGCGGACCAAGCTGGCCGACGGCGCCTACTGGGCCAAGTTCCAGGTCCTGAACGCCAAGTTCGAGATCCCCGAGAAGAACAAGCAGCCCAAGACCAAGCGGAACCAGGTGATGCTGTTCGGCAACGTGCTGAACGGGGAGTTCAAGTGCTTCATCTACCAGTGCCAGACCAACCTGTGCGACGGGAAGTACTGGATCATCCTGGACCTGAACTCCGACAACGTGGAGTTCGTGCGGTCCGTGAACCTGAAGCCCGAGATCAAGGGCAACGAGCTGCTGCTCACCGCCACCATCGACGAGGAGGGGGTGCTGAAGGCCGACCTGGACAAGGAGTTCCAGGTCCAGACCACCGAGGCCACGGGCAAGTACTACGTGACCCTGGAGATCATGACCCACGAGCCCGAGCTGTACGCCATCGAGAACGTGCTGCCCAAGCTGGGCAAGGGGCAGCAGCTGATCGAGGGCAACATCTGGGTGGACAAGTACACCGGGGAGATCAAGTTCGACCCCAAGAAGAACCGGGAGGACCACCGGCACCACGCCATCGACGCCATCACCATCGCCCTCACCGAGCAGGGCTACCTGCAGCGGCTGAGCACCTACAACGCCCAGCGGAAGGAGAAGCAGCGGGAGAAGCTGGACTCCACCGAGAAGTTCCCCGAGCCCTGGGGCGACTTCCAGAAGGACGTGCGGGAGGCCGCCGCCGAGATCCTGATCTCCCACAAGAAGAACAACAAGACCCTGACCAAGAACAAGAAGGGCTTCGGCGTGTGGGGCCAGCTGCACAAGGAGTACGTGTTCGGGAAGCGGCAGGCCCCCGGCCAGGAGAAGGGGTTCCACCGCCGGACCAAGATCACCGAGCTGAAGAACAACAAGCACGTGGGCAAGGTGGTGGACGACGCCATCCGGAACATCATCGAGAAGCACCTGCAGGACAACTTCAACATCGAGATCAACAACCCCAAGGGGTACAGCATCCCCGACAACGCCTTCTTCAAGGACGGCGAGTGGCAGATCTTCCTGCCCAACAAGAACGGGGAGAAGGTCCCCGTGAAGAAGGTGCGGATCAAGGAGAAGATCGGCCACGCCGCCCAGCTGAAGTCCGGGCTGAACCAGTTCGTGAACCCCCGGAACAACCACCACGTGCTGATCTACAAGGACCGGGAGGGGAACCTGAAGGAGCAGGTGGTGCAGTTCTGGACCGTGGTGGAGCGGAAGCTGCAGGGGGAGGAGATCTACCAGCTGCCCTTCGACGGCGCCGCCATCGTGACCACCCTGGAGATCAACGACATGTTCCTGCTGGGGCTGAGCAACGACGAGTTCGAGTCCAACAAGAACAACCTGGCCTTCCTGAGCAGCTACCTCTACCGCGTCCAGAAGTTCACCAGCGGCGACTACTACTTCAGGTTCCACCTGGCCTCCACCGTGAACAACGACGTGGAGCGCATCTACATCAAGAACTTCCTGGAGGGCAAGACCGGCTGGAAGAACTACAACCCCATCAAGGTGAAGATCAACGTGCTGGGGCAGATCGAGAAGATCAAGCGGCCCGCCGCCACCAAGAAGGCCGGCCAGGCCAAGAAGAAGAAGGACTACAAGGACGACGACGACAAGTAA

SEQ ID NO: 685 - DNA, 4137 bp, synthetic construct
  source 1..4137: mol_type = other DNA
atggccccaaagaagaagcggaaagtcatgggcaacatcctgggcctggacctggggaccaactccatcggctgggccatcatcaagaccagcagcaacctgaacttcgagctgctggacaagggcgtgcgcatcttccaggagggcgtgaagctggagtccggcaaggagctgtcccgggccggcgagcggaccgcctaccggtccgcccgccggatcaagttccggcggcggctccggaagatcgagactctcagcgtgctctcccagttcgggtactgccccgagctgagcgacgccgagctgcgggactggcggtacaagaagaactaccccaagaacgacgccttccggcagtggtggctcaccgacaacgagggggacctggcccagaagaagttccagaagaagaacccctactacttccggaacctggccgccacccagaagctggacatggacatcgagtccaaccggtttctgatcggccgggccttctaccacatctgccagcggcggggcttcctgtccaaccggctggacaagaacaaggagtccgagggcgacatgaagcaggccatcaacagcctgaccgacgagatggaggaccgcaccctcgggcagtacttctacgagaagtaccagaagggccagaagatccgcgggcactacaccgaccgcaagcggcactacctcgaggagttcgagacaatctgccgcgtgcagaacctgcccgaggacttcatcaaggtggtgcaccgcgccatcttctaccagcgccccctgaagtcccagaagggcctggtgaagaagtgcgtgttcgagaagaagaagtcctgctgcgccatctcccggcccgagttcgaggagtaccgcatgctgggcttcatcaacagcatcaagatccagatgcccgacgagaaggagatgcggtccctgaaccgcggggagcgcaagtccatcctgcccctgttcttccggaagtccaaggaccagttccgcttcgaggacatcgccaagaagctggcccccaagaaccagtacgccttctgcaagggcgacaagagcgggggcgactacctgttcaacttccccatgaacaccaccgtgagcggctgccccgtgagcagccgcttcgaggagctgctgggctccaacttcatgaagatcagcttcgcctacctgcgggaggacgggcggagctccaacttcgacatctacgacatctggcacgtgctggccaccttcgacagcaccgagcacctgcagcagttcgccgagcagaagctgcagctggacaagggcctggccgagaagttcagcaagatcaacttccggcagggctacgccagcctgagcctgaaggccatccgcaacatcctgcccctgctgcgggacggcatgatctacagccacgccgtgttcctgagcaacatgaagatcgtgctgggccccgccatctgggaggacaaggacaagcgcgagtccatccagaacaaggtggtggccatcatccagaagcagaaccagcagaagaagatcgccgggctgatcaacagcatcctgtccgagcccgacaacctgaagaagaaggagtccgaccagtggggctacctgctgtcggagatcaaggccagcatcggcaagaccagctacgccaagatgaacgaggccgagcgcggggccctggagaagtgggccctggagaagatgcggaagatgatcgtgagctcccagcccgtggccatcgacagcatcgatgaccagatcaagaactacctgcgggagacattcaacgtgtccgacaagagcctggacaagctgtaccaccccagcagcatcggggtgtaccctcccgccaccgagggggagaacggcaaccccctgctgccctccccgcggatcaacagcatccgcaaccccatggccatgcgggccctgcaccagctgcgggtggtgatcaacgagctgatccgggaggggaaggtgtgccaggacacccgggtgcacatcgagatggcccgggagctgaacgacgccaaccggcggaagggcctgcagctgtggcagaaggagaaggagaaaacccacctggagtactccgagaagatcaaggagcacttcaagggggccgggatcaaccgggagccctcccggaacgagatcatgaagtacgccctctgggaggaccaggggcggctgtgcatctacaccgacaaggccaacaacaacatcggcatcgaggacttcctcgacaacaacccccagtacgacatcgagcacaccttccccaagtccaggaccctggatgactccatggagaacaagaccctgtgcgaggtggacttcaaccgcaagatcaagcggaaccgcatccccgccgagctggacaaccacgaggacatcctcgagcgggtgaagccctggaaggagaagtacaaggccctggagtcccagatcgagaacctgcggaagaaggccaagaacaccgacgacatcgggatccgggactgggccacccagcagcggcacaagctgacgctggagcggaactactggaaggggaagtaccaccgcttcgccatgaagaagatcccccacggcttcaagaactcccagatcgtggacaccgggatcatcaccaagtacgcccgcctgtacctcaagacctacttcaagaacgtggacgccatcaagggcagcctggtgtccgagttccggaagatgtggcacatccagcccgaggacaagaagaaggagcggaccaaccacatccaccactgcatcgacgcggtgaccatcgcctgcatgacccggaacaaccgggaccggctggcccagtactacgcccgcctggagtccgcctccaacaccagcaagaccaagcccaacgtgcggtacccctggcccgacttcgtgaagtccatccactccatcgacaaggagacactgatctcccactacacccccaacgtgttcctgcgccagaccaagcgcaaggtgcgcgtgcgcaacaagatccagcgcgacaagaagggggaccccatgttccagcaggggtccggcccccgggggtccctgcacaagggcaccttcctgggggccgtggaggacatcaccctgaacaacaacgggctggtggagacaaagatccgctacgcctgccggaagcccctgatggacctgaaggacgtccagctgaagcacatcgtggacgaccgggtccggaagatcgtggagaaggcccggaagaaggagaaggagctgaacaaggagatcatcaagcagtccgggctggtcaagaccaccgacaactccgagaagaagcggatcgagcacgagctggccatcctgaagaagaagaaggagaacctgtacacgatgcccaacaagaacgggagccccatcccgatcaagaaggtgcggatctacacccgcatcaccaaccccatcggcatcaaggaccagcgcgaccagtccaagaaggcccacaagcggaagtactacgccgagaacgacgagtactacctgatggccttctacgaggggaagatcgccaagggcaaggtcgtgcgggacttcgagctgctgaacaacttcgacgccgcccggcggctcaagacgttcagccccaaggagatcagcgggcccgccagccccgccgtgcccgaggccaagtgctcgggcaagacggagatcgccctgaaggccatcctgaagaagggccagctggtgatcctgaagaagaaggacagcgaggacatcttccggctgcccccggaggagctggtgaagcggctgtacaagatcaccagcttcgagaaggacggccggatcaacttccggcaccaccagaccgccatgatgcacagctccaagggggacgacaaggaccagatgaccatcctgaagtacatgaagatcaacaacctggagcccagccagatcgacttcgacaaccccctgccctggctgcggctgtcccggaccaactgggagttcgccgtggagggggtcgacttcaagctgaccccgctcggccgcctggtgcaggccggcggcaagcggcccgccgccaccaagaaggccggccaggccaagaagaagaaggactacaaggacgacgacgacaagtaa

SEQ ID NO: 686 - DNA, 4302 bp, synthetic construct
  source 1..4302: mol_type = other DNA
atggccccaaagaagaagcggaaagtcatgaagaagatcctggggctggacctgggcaccacctccatcgggtgggccctggtgaacgagtccgagatcgagaacgagtccagctccatcatcaagaccggcgtgcggatcatccccctgtccaccgacgagtccaacgacttcgagaaggggaaggccatcagcatcaacgccgaccgcaccaccaagcggggcacccggcggaacctgcagcggtacaagatccgccggaagcagctgctgaacgtgctgaaggagaacaagctgatcgacaacaagtccgtgctgaccgaaaccggccccaacagcacccacagcctgctgagcctgcgggccaaggccgtgaacgaggagatcagcctggagaacttcgcgcgggtgctgctggccatcaacaagaagcggggctacaagagcaaccgcaaggccaaggacgacaccgacggccaggccatcgacggcatccacatcgccatcgagctgtacgagaagaacctgacccccggccagttcgtgtacgagcggctgaagcaggacaagaaggccatccccgacttctaccggtccgacctgcagaacgagttcgacgccatctggaagaagcagagcgagagctaccccgacatcctgaccatcaagctgaaggagtccctgaagaacaagaacaaggggcagagctggaagatctgcgagaagcccttcaacatcgtgggcatcaagcagtccggcaccgtgcagcagaagaagctggagctgtacaagtggcggacccaggccctgaaggagaagatcgacctggagcacctggccatcgtgctccaggagatcaactcccagatcaacaacagctccggctacctgggggagatcagcgaccggtccaagcagctgtacctgaacaagatcaccgtggggcagtacctgtacgagcagatcaagaacaacccccacaccccgctgaagaaccaggtgttctaccggcaggactacctggacgagttcgagcggatctgggaaacccagagcaagaaccgcaaggacatcctgaccaacgagctgaaggagcagatccgggacatcatcatcttctaccagcggcggctgaagtcccagaaggggctgatcagcatctgcgagttcgagcgccgcgacatcgagatcgagatcgacggcaagcggaagaagaaaaccatcggcccccgggtgatccccaagagcagccccctgttccaggagttcaggatctggcagatcctgaacaacctgaagttcgagaacaccgagactcacacctcctaccccatcagcgagctggaccaggatgtgagcatccgggagcagatgttcgacatcctgaacaccaagggcaagctgagccccaaggaggtgctgaacatcgtgatcgaggaccccgagaagtgggagatcaagaacttcaaggagctggagggcaactccacgaaccagaagctgttcaaggcctacagccagatcgtggagtcctccggccacagcgtgaacaacaagaagctgaaggagagctacgccgacatcttcaagaccatcgggatcaaccccgacatcctggagttcgacaccgagctgaagggcaacctgttcgagaagcaggcctcctaccagctgtggcacctgatctacagctacgagggggacaacagcgagacaggcaacgacaagctgtacgagctgctgtacaacaagttcgggttcgacaaggactacgccaagctgctgatcaacatcagcttccaggacgactacgggaacctgagcaccaaggccatcaagaagatcctgccctacctgaaggccgggcacgagtacagccaggcctgtctgctggccggctacaaccacagccactccatcaccaaggaggacaacgagcggcggcccctggacgacatcctggagctgctgcccaagaacagcctgcggaaccccgtggtggagaagatcctgaaccagatgatcaacgtgatcaacgccatcatcgagcagtacgggaagcccgacgagatccgcatcgagctggcccgggagctgaagaagaacgccgaggagcgggccgagatgacccgccagatcaccaagaccaccgccgagcacaacgagatccgggagaagctgaaggagatctaccccttcaacaccggcatccggatcaccaagaacgacatcatcaagcacaagctgcgggaggagctggccaccaacgggtacaagaccatctacaccaacacctacgtgcccctggagaagctgttcaccaaggagttcgacatcgagcacatcatccccaagaccgtgctgttcgacgacagcttctccaacaagaccatcgccgtgcgggacttcaaccgcatcaagtccaacaagaccggcatcgacgccgtggccgagaagtacggcaacgacagcgacgagttcaagcggtacgtgaacaccgtggagaagctgtacgagaacaacaagatctccaaggccaagcacaagaagctgctgatgaccgccgacaagatccccgacgggttcatcgagcgggacctgcggaactcccagtacatcgccaagaaggcccaggagatcctgcggaagatcgccaagacggtgacccccaccaccgggatcatcaccgacaagctgcgggaggactggcagctgatcaacgtgctgcaggagctcaactgggagaagtacgccaagctggagctgaccgacttcgagttcaacaaggaggggaagaagatccccgtgatcaaggactggtccaagcggaacgaccaccgccaccacgccatggacgccatcaccgtggccttcaccaagcccagcctgatccagtacttcaactacctgagcgcccggaagaacgagaagcacaagaagcactccaacatctacgccatcgagcagaaggaaaccttcgtgaacgacaagaacaagcggctgatcaagccgcccatccccatcgaggagttccgggccgaggccaagaagcagctggagagcatcctggtgagcttcaaggccaagaacaaggtggtgacccggaacatcaacaagacccggaagaagtccggggagaacaagaagatcgagctgacccccagggggcagctgcacgacgagacaatctacggccgcagctgccactacaccaccatcgaggagaaggtgggcagcaagttcaccaaggactacatcaacaacgtggccatcaagtcccagaaggaggccctgctgaagcgcctcaacgagttcgacggggacgccaagctggccttcaccgggaagaacagccccagcaagaaccccatctacctggacgagcaccagagcgccaagctgcccgagaaggtgaagttcgtggtgctggaggagtcctacaccatccggaaggagatctcccccaacctgaagatcgacaaggtgatcgacaagaagatccggaagatcctgaacaagcggctgaagcagttcaacaacgacccccagaaggccttctccaacctggaggagaaccccatctggctgatcgagcccaccgagaagtccaagtgggagaaccccgacaagcccaagagccacgagctggggatccccatcaagcgggtgaccatcaccgggatctccaacgccgaggctctgcacaacaagaaggaccacttcggcaacaagatcgccgactccaacgggaaggtgatccccacggacttcgtgagcccgggcaacaaccaccacatcgccatctacaaggacgaggaggggaagctgtacgaggacgtgatcagcttctacgacgccgtgacccgggtgaaccagggctcccccatcgtgtggcacacccaccccgagcaccccgactgggagctgatgttcaccctgaagaagaacgagtacttcatcttccccgaccccgggaaggggttcaacccctccgagatcgacctgatgaacgaggagaactaccacttcatcagcccccacctgttccgggtgcagaagatcgggaagaaggactactggttccggcaccacctcgagacaaagatcgaggacaccaagaagctggccgggatcacctacaagcggatgcagtccctggagagcatcaagaacatcatcaaggtgcgcatcaaccacctggggcagatcgtgaagatcggggagtacaagcggcccgccgccaccaagaaggccggccaggccaagaagaagaaggactacaaggacgacgacgacaagtaa

SEQ ID NO: 687 - DNA, 4302 bp, synthetic construct
  source 1..4302: mol_type = other DNA
atggccccaaagaagaagcggaaagtcatgtccagcgtgaagctcgggctggacatcggcaccaactccatcgggtgggccatcatgaagaaggaggacgggaagtacgacttcctgaagaaggtggacgagaacaacgaggagatccccaccaagggctcctacatcttccccaagggggtggacgcccaggagaagtccggggccgccatccgccgggggttccgctccgcccgccggcggaccgagcggatccgccggcggaaggccgccaccctgaaggtgctgagcgagaacgggctgtgccccgccctgtccaaggaggagctgtccgactggcggtacaagaagaagtacccctgcgacaacgacgagttcatccgctggcagcggaccgggaccaagggcggggaccgcaagagcgagaagaagaagcagccctactacctgcggtacctggccgccaccaaggactcgctgatgaacagcgaggagggctgctacaacctgggccgggccttctaccacctggcccagcgccggggctacctgagcgtggaggaggagcaggccgacgaggccatcgagctgttcaagcagagcctgtccacgctcatcaacgagcaggacaccgtgctggccttcggcgagcccttcgaggccatcgccgaccagtacaagtccgacgccaaggtgaagtccctggccgggaagatccggcggcagctgaagaagaagctgtccttcctggagatcaagcggttcgtggagctgcagctctccgccaaggagaacctgggcaaggtggcctccggcatcaacgagctgacccagaagatcgaggagtccgggcagcccaccctgggctgctacttcaacagcatctacgccaagcagcacgggaacggcaaggtggagcggatccgcggccggtacatcgaccgggagaagcactacctgaacgagttcaactacatctgcgacaagcagaacctggacgacgagctgcgggggaagctgtacgacgccatcttctaccagcggccgctgaagtcccagaaggacctggtggccaagtgcccgctggagcccaagcggaagcgcatcgccatctcccaccccctgtacgaggagtacaggaagtgggagagcatcaaccgcatcaagatcaagaccgccctggacgaccggctgcggcccctgaacgtgagcgagaaggagctgatcgccagcgacttcgacctggtgggggacgtgtccttcgagaagctggccgagaagctgtgcggcggcgaggacttccgctacatcaaggacaaggagaagctggaggccgaggtggagttcaacttccccatcaccaccaccttctccgggtgccccaccatcgcccacctgaagaaggtgctgggcaaggacaacaccgggaagtactggttctacaagctgcccctgctgaacaccggctacaaggacgagaaggacaagaagcagatcagcatcgaggacatctggcactgcctgttcgtggacagctacggggagaaaaccaagcagcaggcccgggaggacttcgccaagaagcacctggagtgggtggacgccgagaagttcgccaagatcaagctgcggaagggctacggcagcctgagcaaggccgccatcaagaagatcctcccgcacctgcgcgagggggagatctactcccacgccgtgttcatggccaacaccgagcaggtgctgggccggcagatctcccaggaggagcaggaggccatcatcctgtgcatccgggaggccatcgactcccacgactacgagaagatggtgaacgccatcgtgaaccggtacctggacaagtacaaggagaacggggactcctacggggagaactcgttctcccggcgcgtccacgaggacgccatcaagagcgagatcgaggagtggttctccatcgagaagctccacctgatgaccaccgccgagtacgacgggctgaagtccgactgcttctacaagttcgtgaagcaggtgaacaacaagcggcccaaggacgtggagtacttcaagaccgagactatcagctccaagatcaaggacgccctgcagaagaagttccccgaggacaccatccagatcgacttcctgtaccaccccagcgccatcgaggcctaccccaaggccgggaagaagctggggaaccccgagatctcctccatcaagaaccccgtgttcaacaaggccatgcaccagatcaagcggctggtgaacaagatgatcgaggaggggctggtggacaaggacaccatcgtgaacgtggagctggctcgggagatcaactccgcgtcctaccgccgcgccctggcccagtaccagcgggaccacaagaccatccgcgagtgggccaagcgcaagatcatcgagtgctacaaggagaaggagcgggacaacatcaccccctccgacacccagatcgccaagtacatcctgtacgccgagcagaacggccactgcctgtacaccggcgagacaatcacccccaggaagttcttcaccgaccagcgcttcgacatcgagcacaccatcccccggagcaagtggaacgacaactcgatggtgaacaagaccctggccaacgccgagttcaaccgggactacaagaaaaccaagctgcccgccaacatggagctgaccttccggaacgagaagatcagccgggagagcatcatccacaaccgcaacacctggctgaagtcctaccgcatctccgggaacgaggtgcagttcaaggagagcctgagcgacatcaaggaggaggtgcggaagttcaaggccgccgcccgggccgccgccaacgacgccatcgcccacgaggagctgatggtgaaggtgcactacgccaagttccggctggagtacctgagcaagaagtaccgcaccttcgagcgggaggaggtgcccgcctccttcaacaacgccaacctggtggacacccggctgatcaccaagtacgcccgggcctacctgaactcctacttcaagaaggtgaacgtgatcaacgggcagctgaccgacaccctgcgcaagacctggggcctgcagggggagtacgaggagaaggaccggtccaaccacatccaccactgcatcgacgccgtgaccgtggcctgcatcgagaaggggaccgccaaccggctgtccgaggccttccactgctacgagcaggggaaggtgcccaaggtgatcctgagcccgcccatgctgcacttcgacaaccgcatgaagaacctgaagcacgaggtgttcatctaccaccggcaggccgaccgcatcaagcccctgctggacgagctgaacaaggagaaccccaagaagctcaacctgcggggcgccctgaacaagcccaacccctacgggtgcatcaagaaggacgacgccctgctgtacgtgcagcggagcctggtgaaggacatcaccgacaaggacatctcctcgatcatcgacgacatgctgaaggagcggatccaggacctgatccgccgcaacggcaacgtgaagatcgacaagctgaccaaggacggcgtgctggtgctgcccgagtacacctacacctccgacaaggggaaggtgaaggtgatcaaggaggtggtgctgcggaagatccgcctgaaggcctacaagcagagccagtaccccctcaagacctaccgcaagatcgaccagagcgtgaccgagtacaagcggaacatctacgtgctgaaggagaaggagtccaactacgaggcccggatctacggggacctggtgccggacaaccccgacggccggatcaagttcagccggcgggagtacttcctgatcaacaccaaggacatcgtgaagaacgacatcatgatcaggccccagtaccccttcctgttcagcatccacaccggggaccccttcatcatcttcgaccggcaccccgacgagatcgcctggaccgacaagaaggacctgaacgcccggctgttcaagatcaagaagttcgacgacgacaagaacatcatcctgcagcggaacagccacagccactccaacaaggacgtgtacgccaaggaggacgagctggacaacaagctcgccttcctgctgaagaaggtgcccagctccttccgggccgtgcccaccaacatcgacatcctgggccggatcgacatcagctacagcaagaacttcatcgacgacaagcggcccgccgccaccaagaaggccggccaggccaagaagaagaaggactacaaggacgacgacgacaagtaa

SEQ ID NO: 688 - DNA, 4725 bp, synthetic construct
  source 1..4725: mol_type = other DNA
atggccccaaagaagaagcggaaagtcatggccaagatcctgggcctggacctgggcaccaacagcatcggctgggccgtggtcgagaaggaggacggcaagttcgccctggtggacaagggcgtgcggatcttccagcgcggctacggcgacgagcaccaggacagctcccgggccgccgagcggaccctgcaccgcggcgcccggaagctgaactaccggcggaagggccggaagatcgagctgctgcggctgctgggcgccgagtaccaccccttcaccgaggaggagctgatcgcctggcacaagtccaagaagtaccccgtgcggcaggagctgatcgactggttcaagctgaacccctacgacctgcggaagaaggccatcgacggcggcaagctgtcccagaaggagctgggccggatcttctaccacctgacccagcgccggggcttcaagtccaacaagaaggacagcacctccgtcgatggcgagtccaacgggaacgagcggaacctgcccaaggacatcgtcctggaccgggagtaccgggccaagaacggggacatcagcctgagccagaagctgtacaacgacctgtccgaggggaagaaggtgcggaacagctccgagaagaacaacatctcccggatcaccctggaggacgacttcaaggggatctgcaagaaccagaacctgaacaacgacttcatcgaggacgtgcgccgcaccatcttcgacgcccggcccctgaagtcccagaagggcaacgtgggccggtgcgtgttcgagaaggggaagccccggtgccccatctccagcgtggagttcgaggagtaccgcatgtacagcttcatcaacaacatcaaggtgaagcgcaaggacgagcccaagaaggagttcaagtccctgtacgagcagacctacttcgagctcgacatcgagaaggacatcgtgcccaccttcttccggcagaaaaccagcttcaagttccaggacatccggaagaagttcgacaagcacgacaacgccgacctgtacgagttcaactacaaggacaacatcacggtgtccgggtgcccagtgtccgcccacctgaaggccatcttcgggaacgagtggaaaaccaagatcttcaagcggaacggcgtgaacagcaagggcaacgagatcgagtacaacatcttcgacatctggcacctgctgttcgaccactacatccaggacaagaaggacgagcccctgctgaagatcgccaaggagatcttcgagctggagcccgagcagtccaagaagctgctggaggctcccatcacccagggctacaccaacctgtccttcaaggccatcgccaagatcatcccgttcctgaagaagggcttcaggctggaccaggccatcatcttcgccaacatccccaccgtgctggggctggacaaggacgacgacctgcccgacgacatctacgaggacatcctcgacatcttcaacaactacggggacgagaagaagcggaacaccatcgtgaacgactgcatcagcaccttccgcaacgagtccaagaacgcccacagcaactaccagatcgatgacatcgacaagcagatcatcgagaagcaggccaagaagaagttcggggaaaagacctggaacgacctgtccgaggtggagcagatctccatcctggacgagctggggaacaacttcgagaaccagctgcggcagggcggggtgggcgggcagttcatcaagaccgagtccatcaagcagaaggtgaaggactacctggtgaacaacctggggatcgccacccagctgaccgacaaggtgtaccaccccagcgccatcgagctgtacgagaaggtggagtacaacgacaaggggctgcggctgctgggcagccccatcatcgactccatcaagaaccccctgttcatgcgcagcatgtgcgagctgcgcaaggtggtgaacgagctgctcaagaccaacatcatcgacaacgaaacccagatcatcgtggagctgggccgcgacgtgaacgactacaacatgcggaaggccatcgagcgctaccagcgggagcgcgagactgagaacgagttctacaagcacctgctggaggagttctacaaggagaagaacatcaagaaaaccccctccgtggaggagggccagcgggtgaagttctgggtggagcagctcgacgacgagcaggacagcgaggccttctacaccaagctggaggagcacaccgcccagtacaccaagaaggaggaccgcatcaagctcccccagtacgccatcgagaagtaccggctgtggcgggagcagaagggcatctgcccctacacccacaaccccatcggcatggccgacctgctgaacgggaacaagtacgacttcgagcacaccgtgcccctgtccaagtccttcgacaacagcctggccaacaagaccatcgccgagtcccacttcaaccggtacaagaaggggaacaaggcccccttcgagctggaggccgaggaccgcaagaaggtggcccagttcatcgagcggtgggagatcaaggtggaggagctggagaagcggatcgagaagcagaagggcaaggccaagaacatccaggacaaggagcggaagaaccagaacatccaggagcggcactacctgcggctccacctgaagtactggaaaaccaaggtgaacaacttcaagatcaaggagatcaccgacggcttcaagaaccgccagttcgccgacatcagcatcatcaacaagtacgccctgatgtacctgcgctcctgcttcgacaacgtgtccaacatctccagccgcttcatcgacgagtaccgcaccatcgtggggtacgagaagtcccggaactaccacacccaccacacgatcgacgccgtgttctgcgcctgcgccgtggacttcgcccggcgcaagcccgacgccctggccaagctggagcggtactacaagatcaacaaccagtacaagaaggccacctggttcgacaaggagggggatgaggcgaagatctccagcctgaaggagaagctggagaaggccaaggacgacctggtgccctggtcccagttccgggacgacctggagaacctgggcaacagcgtgctggtgtcccggcgcttccaggacaacctgaagaagcagaccaagaagaagatccggagccggggcaaggtggagcaccgcgccgccaacatcgacggcgacggcaacgtgctggagtggaagtacaagaccgacatccacggcaacaagatccccgtgaaggggaagatgtgcgacgagaaccccgacttcgtgctgcactgcttcaaggacggcaagaagaagcgcctggaggtgctgggggactaccccgagtactccgaggacaccatctacagccagggctacctgtacgtccggaacaagaacaaggacgtgtgctacgagaaggaggcccggtacacctggcacaacgaccgcagcgacgccaagaccaacggcctgcgccggcggttccacgaggccaccctgtacggggccctgaagaagcccgagctgaacgacgagggcaagttcaagttcgacgagaacaacaacatcatcctgcagaagaacaagaacggcgaggacatcgtgttcaacaacatccgcaagaagctggaggacgcccggaaggccaccaacagcatcgtggatgagactctgcggaagatcatcaccgacgacaaccggcggtccaagctgctgaagcccaaggacgaggagcgggccatcctgttcaccatccctcccaagaagatcatgaagcaggtgctggccgtgatcgaggagatcagcaagtgcaactcccaggaggaggtggtgctgctggacgacaagaagcggaagctgcggctgcagtaccgcagcgaggccaccaagatcggccgcgtgcggtgcttcaagtccatcaaccccatctccatcaaggagaacagccacaaggccatgaaggacggctccgagaaggagtccatggcccacaagcactacgccctgtccgtgaaggacatgacctacgccgccgccatctacgagttcgagaagatcgacaaggccaccggcgagctgaagaaggtggagcgccacctcgagatcgtgaccgactacgaggtggccgacttcctgcggggcgacaaggtgcagaacagccccttccccgccaacgtgaagttcaaggacgggaagcaggaggtgctggtgagcaaccccaagatcatccagtccggcaagtacgtgctgttctacaaggacgaggacgagaaggaggacttcatcaagtgcatcaaccacaacgacatcagcaccgagctggccaacaccttctccaagcggctgtaccgcatcgacgccatcgagactggcccgcccctgcggatcaacttctgcatccacaactccgccatgaagaagaagtccaccgacaagaacgagatcaccatccagaagtacatggatgagaacaagctgaaggacagccagctgaagctggacgacagcgtgccctggtaccgcatcaccaagaagaactggaacttcctggtggaggggatcgacttccggatctcccccatcgggaagatcgagcggatcaagcggcccgccgccaccaagaaggccggccaggccaagaagaagaaggactacaaggacgacgacgacaagtaa

SEQ ID NO: 689 - DNA, 4140 bp, synthetic construct
  source 1..4140: mol_type = other DNA
atggccccaaagaagaagcggaaagtcatgtccatcgccgagaagaacaacagcgagtactacctcggcctggacatcggcaccgacagcgtgggctgggccgtgaccgacctggactacaacatccagaagttcaacggcaaggccatgtggggcatccgcctgttcgaggccggcaagacggccgccgagcggcgggtgttccgcaccacccggcgccgcatccagcggcgcaagcaccgcatcgagctgctgcaggagctgttcgacagcgagatctccaaggccgacaccaacttctacctgcggctgaaggagagcaagtactgggtggaggaccgcacgctggggcagaccaacatcctgttcaacgaccccgagtacaccgacaaggactactacaagcagtaccccaccatctaccacctgcggaaggagctgatgaccagcgacgagccgcacgacgtgcggctcgtctacctggccatccaccacctgatcaagaaccggggccacttcctgttcgagggggagggccggaaggacgtcagctccttcaaggtgatcttccgggagctgtgccagtccatgcacgacgagatggagatcgtgctggaggccgccgacctggacgaggtggaggcggtgctgaagaaccgggagtacgggatcaccgacaagaaaacccggctgaacaagctcctgaccatcgacgacgagcacaagaaggagcagaagtccatcatcgccctgctggccgggggcaagaccaaggtggacgccctgttcggggagaaaacctccgaggacagcgacgtgaaggacatcaccttcgccggggacaagttcgaggagagcttcgacgccctgagcatcatgctcggggacaagatgttctgcctcgagaagatgaaggccatctacgactggtccatcctggaggagatcctccagggcgaggactacctgtcctacgccaaggtggccacctacgagaagcacaagaacgacctggccaccctgaagaagatcatgaagaagtaccggtccgacgagtacgacgcctgcttcaaggaccccggcaagaaggacaactactgcgcctacgtggggatggccaagaagggcaagaagaagctggtgctggagaagaagtgctcccaggaggacctgtgcaagtacctgggcaaggtgttcaaggacgtgaagcagaacgaccccgacctgcagtacctgatggccgagatccagcggggcaccctgctgcccaagcaggtgaacaaggacaacggggtcatcccccaccagctccacctggaggagctgcggatgatcctggccaacgtgaagaagtacctggagttcctgaacgacaaggacgactccgggttcaccgtgagcgagaagatcgagaagatcttcgccttccggatcccctactacgtggggcccctgaacgcccaccacaagtccctgggccactgctggatcgtgcggaacaagggcatggagaaccagaaggtgctgccctggaacttcgacgagatcgtgaacctggaggccagcgccaccgccttcatccgcaagatgaccagcaagtgcacctacgtgatcggcgccgacgtggtgcccaagaactccctggtgtacagcgagtttatggtgctgaacgagctgaacaacgtgaaggtgaacggggagctgctgcccgtcgagctgaaggagaaggtgttcgaggaggtgttcaagcgggtgaagcgggtgaccgggaagcggctgcgcgacttcctgatcgccgagggggccttcaagaagggcgacgagctgtccgggttcgaccagaacttcaagggctccctcaccgcctacctggacttcaagcgcatcctgggggagaagaagatccccaaggaggccatcgaggagatgatccaggccatcgtgctgttcggcgacgaccgcaagctgctgaagcggcgggtggagaagcggtacggcgagctgctctccaaggaggagatcgccgccatctgcaagctgaagtacaccggctggggccggctgagccgggagttcctggaggagatctacgtggtgaaccacaagaccggggagatgatcaacatcatctccatgatgcacgggaccaacgccaacctgatgcagctgctgagcagcgagtaccggttcaccgaggccctggaggcctacaacgaggagcggcagaccgaccactccgacatcgcctacgggatcgtgaaggacctgtacgtgagccccgccgtgcggcggtccatctggcagtccctgaagatcgtgaaggagatcgccaagatcaagaaggccgcccccaagaaggtgttcgtggaggtggcccgggagaacgccgagaagaagcggaccgtgtcccggaagaacgcgctgatcgccctgtacaagaactgcaaggaggaggagcgcgactggatcgccgagctcgacgccaagaccgaccacgagctgcggcgggaccggctgtacctgtactacacccagatgggccggtgcatgtacaccggcaagcccatcgacctgaaccggctgttcgacaccaacgtgtacgacgtggaccacatcttcccccagtccaagatcaaggacgacagcctgtccaaccgggtgctggtggagcggaaggtgaacgccaagaagtccgacgtgtaccccctgcccgaggagatccggaacaagaaccggggcttctggacaatgctgcaccgcaaggagctgatctccaagcggaagtacgaccggctcacccgggtgacccccttcagcgactccgagctggccgacttcatcgcccgccagctggtggagacacgccagagcaccaaggccgtggcccaggtgctgaagaaggtgttccccgacaccgacgtggtgtacgtgaaggccgggaacgtgtcccggttcaggtacgacttcaagatgatcaaggtgcgggaggtgaacgactaccaccacgccaaggacgcctacctgaacatcgtggtgggcaacgtgtacgacaccaagttcaccaagagccccctgaacttcatccaggggaaggacgggaagaactactccctgaaccagatgttcaactacgacgtggagcggtccggcgtgatcgcctggaaggccggcgagaagggcaccatcaccaccgtgaagcggatgatgaagaagaacaacatccagttcacccgccacgccttcgaggtgaagggcgggctgttcgaccagaccatcatgaagaagggcaagggccaggtgcccatcaagagctccgacgtgcacctgagcgacatcagcaagtacggcggctacaacaaggccgccggcgcctacttcttcctggtggagcacaccgtgaagaagaagcgcatccgcaccctggagttcgccccggtgtacctggccaagaagctggagaaccggtccgccctgctggagtactgcaagaacgagctgaacctgctggagagcaggatcctgctgcccaaggtgaagatcaacacgatgttcgagatcgacggcttcaagatgcacatctccggccggaccggcaagcaggtcatcttcaagggcgccgagcagctgtgcatctccgagcagtacggcctggacatcaagaagatcaacaagtacatccagcggtgcaagctggcccgggagaacctgcccgtgaccgccttcgacggcatcagcacccacaacaacgacgtgctgtacagcgtgatgatgcagaagctgaaggacaccgtgtacggcatccacctgtccagccagctgaagaacctggagaagggcaaggaggtgttcgggaagctgtccctgaaggagcagtgcgaggtgctgatggaggccctgaacctgttcagctgcaacagcctgagcgccaacttcaagctgatcaacagcggggcctcctgcggcaccctgaagctgtccaacaacttcagcaaccgcaagtccttcatcctgtacaaccagtccatcaccgggctgttcgagcagaaggtggacctgctgcggctgaagcggcccgccgccaccaagaaggccggccaggccaagaagaagaaggactacaaggacgacgacgacaagtaa

SEQ ID NO: 690 - DNA, 3483 bp, synthetic construct
  source 1..3483: mol_type = other DNA
atggccccaaagaagaagcggaaagtcatgaacaaccccaagttcatcctggggctggacatcggcatcagctccgtgggctgggccgtgatccgggacgacgggtccaactcccggatcgaggacttcggggtgcggatcttcgagtccggcgagaagaaccagggcaagaaccgcaagtcccaggagcgccggaagtaccggtccgtgcgccggctgaaccgccggcgcaagcaccggcgcgaccggctgctgaactacctgcacagcatcaacgtgctggccatcaccgacctggaggagttcatccgccgggccgggttcaacacctacgagctgcgggtgcgcggcctgacccacaagctgaccgccatcgagctggggtacgtgctgatcaacctgtccaaccaccggggctaccgggagttctacgacgaggacaactccaagcacagcgagaaggggatcatcaagaccgcctgctccaacctggacgagatctacaacacctcccagtaccgcaccatcggggagatgctgtacgaggacaaggccttcaaggacatcgagaaccccaccaacaagttccccgtggtgcggaaccaccggggcaactaccggttcctgatcaagcgggagtacatcgaggccgaggtggagcacgtgctgatcgcccagagcaagtactacccccagctcaccagccagtccatccaggacatcaagaacatcatcttctcccagcgggacttcgaggacggccccgggaacccctccgaccagagccggcggtacaaggggtacgtggacgccaacggggagtgccccagcatcggccagtgccccttctaccccgagcacaagcggggcttccggaacaccctggtgggggacatcttcagcctgatcaacatcctgagccagtactcctacctggacatctccaccggggagattggcatcagcgatgtggccgcccgggccctgatcgacaacgcgatcgagttcgggttcctgaccgtgggcgacatgcacagcatcctgaacatgcacgggttcaccgtgatcaccaaggagcgggccaccaagaccgtgaaggccttccagttcatccccaagatcaagacgatcctggagcagagcggcctgtactggccccggtggatcgccgagaagcagttcgacatcgagacaccctccggcctgcaccggctgggggagatcctgagcaagtaccacacccccaggcggaagcggaacgagctggagaacagcaagctggtgaacgacagcttcatcgccctgagcatgtccaagagcttcaacggcaccaccggggtcagctaccggtacatgatcgaggccatcgaggccttccggctgggggagctctacggggacttccaggcccgcaaggtgaagtccttcaacgagctgaacatccggaccgacaagcagatcgaggtgaagaagctgcccccgatcaccgaccgggacatcagcatcaaccccgtggtgttccgggccatcaacgaaacccggaaggtggtgaacgccatcatcgcccagtacgggaacatgtcctccatcaacgtggaggtggcctccgacctggggcggtcccacgagcagcgcctggagatcatcaagcgccagaaggccaacgagaaggcccggcagcagctgatcgccgagtaccaggagctgttcccgcaggagaagatcagcagcgacgccctgcagcggtaccggctgtacaagctgcagggcggcaagtgcatgtactccggggagacaatcgacctgccccggatcaacaccaagatgtacgaggtggaccacatcgtgccctacagcctgatcctggacaacaccatcaacaacaaggtgctggtgctgtcccgggagaaccagaacaaggggcagcaggtgcccctgcagtacatgcgcgacaagaagcagcgggactccttcgagaagcggatcgaggagatgctgaagaacgacaaggtgagccccaagaagtacaagtacctgtgcctgcgggacctgtccgacgaggagactctgaactcctggaagtcccggaacatcaacgacacccggcacatcacccggtacgtggtggggtacctgcagagcagcctgaacttccagagcaaggtgaagaacaacgtgcacggcatcaaggccctgatcgtgagccggttccggcggaagtggctgtccaacaccatctggggcgccgaggacaaggaccgcggcaacacccacctgcaccacagcgtggacgccgtgatcctggccaacctgacccccgcctacgtggaggtggccagcgactacctgaagctgagcgggatgatccggcggaacaacggcaagatgtccgccgagtgcgaggactacctcgcccgctgcatccggaagatgcagacccactacggcttcaagcccagctacaccgacggcctgctgcgggcccaggccaagcggggccagatccccaccctgatccggaacctgcggtccgagatcctggtgcggttcatcgacgaccccagcctggagagcgactaccgcaagggggtgatggacttctacggcgacaaccacttcgccgagcggctgcggatgcccatcgtgagctacaagctcgagaagtgctaccgcggccccgtgtccgccgacaaccccatctccgtgcgggagatcgacggggagctgtaccagatcaaccgcaagagcgccagcctggtgaagcggcaggacttcagcaaggggaagatcgtgtccgaggacgccgacctgatcaagaccctggacagcatcttcaccgggaagtccgacaagtacagcctgggggactacctgaacgacaacaacctgtccgagttcaagaccctgctggggcggcggatccacaagatctccgtgcgggagaagctgggccggcaggagcccgggatcaagaagatccagcccggcaaccagaccctgctggacatcgacaagtactactgcctggagctgtaccgggacaaggccaacaagctgttcgtgcgggggctgcggtacttcgacctggtgaagaagaacaagaagctgtacctgaacaccccctaccccgacaactacggggagcacctgatgtacctgtacaccaacgagtacatccacgtgttcaaccggcaggagcagctgaagttcgccgggaactaccgcagcatcaagaacatcaactcccgccggttcaaccagcactccaaccgccccttccagcaggacgtgaccgtgttcagcatcgcccagaccgacaccatcaagaagtacgacgtggacatcatgggccggatccggggcgagatcaagtgcggcgagcccttctccctggtgcccgggaagaagaagcggcccgccgccaccaagaaggccggccaggccaagaagaagaaggactacaaggacgacgacgacaagtaa

SEQ ID NO: 691 - DNA, 5130 bp, synthetic construct
  source 1..5130: mol_type = other DNA
atggccccaaagaagaagcggaaagtcatggccaagatcctgggcctggacctgggcaccaactccatcggctgggccgtggtggagacactgaacaacaaggacttcggcctgctgaaggagggggtgcggatcttcagcgagggcaacaccgccaaggaccgcaccgccaagcgcggcatccgccggctgtacttccggcggcggctgcgcaagatcgagacactgcggatcctgtccgagtgcgggtactgccccaccatcagcaccgaggagctgaacaactggcggaagcacaagaagtaccccatcgagaacaaggacctgatcaactggctgcgcaccgacaacatcggcggcaagggcgacaagcagcagcagatcaagaacccctactactaccggttcaaggccgtgaaggagcccatctccaagtacaacgtgggccgggccatctaccacctggcccagcgccgcgggttcctgagcaacagcctgagccaggagtccgacgagctgatcgtgctggtgaccaacaagatcaaggagaagatcgaggaaaccgagaacaaggaggagatccagaaggagatcaaggagatcttcaacggcctggacgaggagttcgccaaggatctgaaggtcaagaagctgaccaaggagatccacaagctgaagggcgagaacttcatccaggacgtggagaagctgatcaacaagaaggagaacctgggcgtggtcaaggccgggatcgagcagctgtccaaggagatccagatctccggccacgagtacctgggggagtacctgtacttcctgtaccagtcccactccaacgtgatcaacaacaagcagagcgtggagttctacaacagcttcgtggagaagttcaagaacgagaacgacgccaagaccgagctgaccaacaagatccggacccggtacatcggccgcaaggtgcactacctgcgggagttcgagcagatctgcaaggtgcagaacctggagaagatcaagaccaagaacggcaagaccctgaaggaggagctcgagaacgccctgttctacgtgcgccccctgaagtcccagcggggcgccctggggaagtgcaagatgcagaaggacaagagccggtgccccctgtcccaccccacctacgaggagttccggatgtggcagttcatcaacaacatccgctaccgcaaccgcaagatcgagagctcccagttcgagcacctgagctacgacgacaagatgaagatcgtgcccctgttcttccgggccacgaacttcaagttcaacgaggtgatcgccaagatcgaccccagcctggagacatacgagttctcccaccagaagcagttcgaggagaagcccaaggacagcctgaccgtggagagctgccccaccatcgcccggctggtgtcgatcttccggcacaaggggaactgggaggacatcaaaaagaccacctttcggtactgcgccaacgaccgggacgggaaccccaaggtggactccaacaacaagcccgtggagtccaagatcgacatctacgaggtgtggcagatcctgtaccggtccaagctgacccggaacaacgagaactacctgcggcagttcggcaaggagaagctgaagctgaccgacgacaagaaggccagcgacttccagaacctggccaagcgcctgaaggagggctacgccatgctgagcctgaacgccatcaagaagatcctggactacatgctgccccagaacgagaaccggcccgggtacatctactcccacgccgtgttcttcgccaacatgaagtccatcgtggggaagtccatctggcaggagaacaaggacaagatcatcgccgacatcatccagaagctggacctgcagcagaaggccaacgacaagaacaccttcgtgaactccctgctgcgggacttcttcaaccagccagacgaggacaagcacttcccctacgacgactacaccctcgacaacagcgagaagaagctgatcgagatcaaggccatcgagtacgtgggctcctacacctggaaggagtcccccgaggggttcaagaaggagttcctcaacttcgccgagaacgagtaccagctgttcctgcggaacgtgaagatcaacgggaacaagagcgactacttcaagtccgtgacccggaaggacaaggtgatcaaggactacatcaaggcctcctacctggagaagctgtccatcgccgagctgcgggagacattcaacatcaagaacctgaagctgtccaaggaggagatcgtggaccggcagctggggcggctgtaccaccccagcgagatccacctgtaccccaagcccaaggtgatcttcgacgtgaagggcaacgagaagctgatcatgcccagcccctacctgcccgacatcaagaaccccgtggccaaccgcaccctgcacaagctgaaggggctgatcgagtacctggtggacaacaacatcatcgacgagcggaccaacatccacatcgaggtggccaaggagatcaacggggccaacatgcggaacgccatcacccagttccagcgggaccggcagcaggagaacgagaagtaccgccggctgctggaggagttcgagaagcccgtgaacatcgacaccaccgagaaggtggtgctgtggaaggaccagctggagaaccagaccgtgttctacgacagcctgaaggagttcatcaagctgaaggactccaagaagctggacaacacccagaagaaggagctggacgtgctgaagcgccggctctgggacgagcagaagggcatctgcatgtactccggcgagagcatcagcatgagccagctgttccaggacggggtggtggagatcgagcacaccttcccccggtccaggatccccgacaactccctggagaacaagaccatcgccctgcgggaggagaaccagaacaaggggagcaagatcccctacgagctgggccccgagaagcacgccaagatcaaggggcggctctacttctggaagaacaagatcgacgacctgcgggccgactaccagcggctggagaagctggtgcggcaggacctgttctccacccccgagaagcgggacgtggccatccagaagaagttccacaagcggatggagctggagtactggaccaacaagaacgggaccggcaagtacgaccggttcctggccaaggagatcagcaagaagttcaagaactcccagctgaacgacacccgcatcatcaccaagtacgccagcaagtacctggagacatacttcaccaagaagcccttcatctcccagggcgtgctggtggacaccttcaagcgggagtggggcgtgctgcgccaggacgagaagaagtcccgggccaagcacatccaccacaccgtggacgccatcgtgatcgcctgcatgacctaccggttccgggagatcatcctgaagcgctactacaagcgcaaggagcggggcgagaacgtgtccctggaggtgcccttcaaggacttcgccaaccgcctccgcaacgagatcgaggaggaggtgctggtggagaacaccttcaaggacaagaccatcaagcagtccctgaagaaggtgcgccaccggggcaagatcgcccacaaggagaagtacaagaaggacgccgacggcaacttcatcaaggacaagcggaaccgcaagatcgtgaccaagcggtactaccgcctgaagaagggccgccagctgccctccaaccagatcgaggggctgaaggagggcgaggactacttcgccgaggtgaagaagaacggcaagacctgctactacgagttcgtgtacgacaagaacggccagaagatccaggagctggtgcccatctacagcaagggcaacaccatccgcgagcggatccacgaggactccttctacggggccatcaagcagttcgacatcgaggacggcaagctgcagaagggggaggacgggaagatcaagctgaagcaggacaaggacgagaaggacaagatcttctacgtcatccgcaagcccctgatctacgactcctccggcaacaagggcttcaagaacatcgaccagctcaagaccaccaacatcgtggaccccgtggtccacgagatgctgctgctgcaggccaacgaggccgagaacttctccaagagcttcgatgacggctactacatgctgaagcccaagcgcatcgacaacaagatcgagaaggacgagaacaacaacatcgtgttcgagcgcgacaacgaggacaagtacaagaaggggccctgcatcaagagcgtgcggatcttcagcaagctgaccgaccccatcaagctgaagcggcaggtgttcgagtccaagatccagcacaagtacaaggagatgtactacgtgaacaacaagaacaactacctgtacgtggtgtacgagaacagcatgaagaagggcgagctgaaggccgtggtgttcagcctgttcgactccgtgaagggggagcgggagtccctggagctggagtcccgcccctaccccgacagcatcgaggtgctgatcgggaagaacaggatcaactacgagctgctgacccggaacaaccgggacgtggtcctgaagaagaacctgcacgtgctgttcaagatcgacaaggaggagacaatcgaggacatcctcgagctgtccaccaaggagacacacaaccggctgtaccgcatggagggcctgcggaaggacctggtgtacgacgaggagaacaagtgctacagccggcccgggaccaccgggcagatcgagctgcggcaccacatgaccggcaacaagttcaacaacaactccgagatcgagggcctgcaggacatctaccggcggtacttcggcaacaacaagaagatgccggactccgtgaccgagttcaaggtcgagtaccccttccccttcctgctgatgagcctgaacaagatggacgtgttcatcgagtccatcgacttcgagctcaccccgctgggggagatccggctcgtgaacgagccggccaagcccaagcggcccgccgccaccaagaaggccggccaggccaagaagaagaaggactacaaggacgacgacgacaagtaa

SEQ ID NO: 692 - DNA, 4233 bp, synthetic construct
  source 1..4233: mol_type = other DNA
atggccccaaagaagaagcggaaagtcatggagaagatcctggggatcgacctggggaccaactccatcggcctgaccctgcgcgaggacaacgagttcaagtggtacggggtctacaccttcaagaagggggtgggcgaggggaaggccggggagttctcctacgccgccgagcggaccaagcaccggtccacccggcggctgtacaacgcccggcggtaccgcaagtgggagacactgaaggtgctgatcgagaacgacttctgccccctgcggaagggcaacctcgacaagtggaagcactacgccaagggcatcgggcggtccttccccatcgacgacgagctgttccagcagtggatcaagctcgacttcaatggggacgacaagcccgacttcaccagcccctgccagctgcggcggatcctgatcgtggagaagctggacctgagcatcgcccagaaccggtacatgatcgggcgggccctgttccacatcgcccagcggcgggggttcaagagctcccggaagaacgggcagaacgagaaaaccgccgtgttcaaggggagcaccgagacaaagaccatcggccggaacgagtacgagaacctgatcatcgagaacggctccctgggcgccgccttcgccgccctggaggacaagaacatccggatccggaaccgctacaccctgcggtccgactaccagtacgaggtgaagaagatcctgaactaccagaacatcgagaacaaggacttctgcgagaacatcgagaaggccatcttcttccagcggcccctgcggtcccagaagggcctgatcgggaagtgcaccctggagcccaacaagtcccggtgccccgtgagccaccccaagttcgaggagtaccgggcctggagcttcatcaacaacatcaagttcctgaacaaggagacaaacctcttcgagcccatccccctcgccctgaagcagaagatctacaacgacaagttcttctacaagagcaagcgggagttccccttcaaggagatccgcaagatcatctccatcaacggcgggaaggagtgggagctgaactactcctccaagatggacgacgtgtccgtccccagctgcttcgtgagcgcccggctgaagtccgtgttcggggagaactgggagaactaccacaagcaggtgacccgggccaacaagaacgggatcaaggagacaaagatctacaccatcgaggacatctggcacatcctgttcgagttcgaggacgaggagtacttcaaggagttcctgtccaaggtgctggacctgaacgacagccagatcgacgagctgtgcaccctgttcaactccttccccgtgggctacgccaacctgagcctgaaggccatcaagaacatcctgcccttcctgcgggacgggaacatctacagcgagtccgtgatcctcgccaagatccccgagatcatcgggaagaagatcttcgaggacaacaagaacgagctgctgagcgccatcaaggagaaggtggcccacatccggaacaagaagaacaacgtgagcatcgtcaacaacctgatcttcaagtactacgccctggactacgaccagcggttcggctggaaggacttcgagtacaagctgagcgactccgacctgaacgacgtgaagtccaccatcatcgagttcttcgggcagaaaacctggaacaccaagaccgaggacgagaagcagaccatcatctccaaggtcagcaacctgtaccaggacttcttcgccagcgagaagcgcgagcacatcgcccagccccacctggtgaactccatcaaggagttcctgctggagtccttcgtgatcaacgagaagatcgtgaacaagatctaccacccctcccagatcgacatctaccccaagaaggaggggcagcagtacctgctgtcccccaagaccgccgccttcaagaaccccatggcgtacaagaccctgtaccgcctgaaggacgtgatcaactacctgatcgagaaggagatcatcgacaacgagacacggatcgtggtcgagatcgcccgggagctgaacgacagcaacaagcgctgggccatcgagaagtaccagcgcgaccgcgaggccgagaacatcgagtacgccaacgccatcagcgagctgctgaaggaccccgagttcagcggcatcgctgaccccaacagcaacagcgacaccgacaagttccggctgtggctggagcagaccgagaacctggaggacaccctcaaggagatccagaacatcaacaagaacaagtccctgaccgtgaaccagaaggacatcctgaagtaccggctgtggaaggagcagaactgcacctgcctgtacaccgggaagatcatcaacctgaccgacctgttcgacaccaacaaggtggacttcgagcacaccatccctcggtccaagtccttcgacaacagcctggccaacctgaccgtgtgctacgccgactacaaccgcaacgtgaagaacaacaagatgccctccgagctgcccaactacaacgaggagtggaacgggtactccgccatcaagccccggctggagagctgggagaagaaggtggacgacctgttcaagcagatcgacttctggaagttcaagagcaagatcgccatggacaagtccaccaaggacgacgccatccggcagaagcacctgcggcagatgcagtacgactactggaagaacaaggtggagcggttcaagcagaccgagatcacccagggcttcatcaacagccagctgtccgacacccagatcatcaccaagtacgcctaccactacctcaagaccgtgttcaacaaggtggacgtgatcaaggggtccaacaccgccgacttccggaagatctacgggatcaacagcaaggagatcgagaagaaccggggcgtgcacagccaccacgccatcgacgccgccgtgctgaccctgatcccctccgcccggaagcgggaggagatcctgaagaaggcctacctgtacgccgagaagaacttcggcaagcagtacctggagcagcccttcaaggggttcaactacgggatgatcatcgagatcgagaagaacatcctgatcaacaacatcgccgacaaggaccacaccctgacccccggccgcaagatcgtgcggaagcgggggcgggtggtgtggctggacaaggagaacaagaagcccaagaaggcccagggcgactccatccggggcgagctgcacctgcagtcctactacgggaagatcaagatcgccagcaaggacgagaacggccggctgatccgcgacaagaacaacgacatcgtgtacaaccagatcgacggcaaggacgagatctggatggtgatccggaagcccatcgacaacgtgaacttcgcctccgacatcgtggtggaccagcacctgtacaacttcctgaagaagcagctggagtccggcaccaagcaggtggacctggtggacttccagggccgcaagctgcggcacctgcggtgccgggtgaaggccgcccggggcttcatgaaccccgacaacgccaccgtggtgaaggagcaggtgtacaagtcccggaaggactacaagaactacatctacaccgactccggcgagaactacatgtacggcatgtacgagaacgagaacggccggaagatcatcgccatcaacaagttcgaggccagccggttcagcctgaaccagaacttcgacagccgggaggagatcttcaagatcaaggagccggtgatgatcggctccgggaagaagtccaaggaggcccggctgatccacgtgttcatccccgggcagaaggtgatcttcttcttcgagaacaaggaggagctgaaggagctgatgcccaacaagatcagctcccgcctgtactacatcaagcggttccaccaggccgagcgcggctccatcgtgttccagcaccacatcgaggcccggaacgacgaggagctgagcaaggtgttcggcgtgatcgggaagaacggcttctccgtggacaagctgaacaagaacttcagcccgccccgcatcctgtacacccccaacaaggacatcttcatcatcgaggggaaggacttcgacttctccctcgatgggagcatcaagttcaagtacaagcggcccgccgccaccaagaaggccggccaggccaagaagaagaaggactacaaggacgacgacgacaagtaa

SEQ ID NO: 693 - DNA, 4689 bp, synthetic construct
  source 1..4689: mol_type = other DNA
atggccccaaagaagaagcggaaagtcatggccaagatcctcggcctggacctggggaccaactccatcggctgggccgtgatcgacgccaccaccgaggacggcaaggtgaagcggtacaacttcatcgccgacagcggggtgcgcatcttccccgagggggtggagcccaccaccatcgggcagggcgacaaggagcagtccaagaacgccagccggcgggagcaccggcagatgcgccggcaggtgtaccgcaagaagctgcggaaggtgaagctcctggaggccctgatcgagctgaagatgtgccccctgtccatcgagggcctgtaccagtggagcaagtggaacaagtccaagaaaaccgaggggaagctgttccccaccgagcccaagttcgtggcctggctgaagatgaacccctacaagctccgctccaaggccctgatcgagcccgtggagctgatggagctggggcgcatcttctaccacttcatccagcggcggggcttcctgtccagccgcaagggcaacgacgacggggccatcttcaagggcaaggagaacatgtccggcatcgactccacccgggagctgatgaacggcaagcccctgggcaaggtgctgttcgacatctcctacaaggagggcgagaagtacaaccagaagaagaacaacgacggcaacgagctgcgggtgcgggcccgctacacccagcgggacatgtacgtggaggagttccacaagatctggaagcagcaggccagccgcctcggcctggagcagaaaaccatcgagatccggaagtcccggttcctgaagggctccctgaccgcccggcggaaccggcacaagctggagaactacatcgagaagtacggcaaggagcacgtgctgatcaaggggaaccgggtgatcaccgaggagcaggtgcccctgaagcagttcttcgccggggagatcacggagcacgacaagcagctgcggttcaagtccaacgagagcctgctgttctggcagcggcccctgcgctcccagaagaacctgctggacaactgcaggttcgagaacaacctccccgtgctgatggagaacggggagttccgccgcaagggcaaggacatcgtgcggcggagcaagaagccctgccccctgtcccaccccgagttcgagctgttccggagctaccagttcatcaacaacatcaagtacgggaaggggcagttcctgaccgccgaccagcggcacctggtgctggagatcctgaactccaaggacgggaacttcaacttcgaggagatccccaaggccctgaacctcacctacgagaagttcaactacgacaacgaccagaagatccaggggaacaccaccatcaagaagctgaagtccctgttccccgaggagctctggatcgagtcctacgaggacatctggcactgcttctacttcttctacgacaccgagaagctgttcgagaagctgaagaaggacttccagctcaagaccaacgacatcgacaagatcagcaagatcaagctgaaggacggctacagcaacgtgagcctgaaggccatccggaacatcaacagcttcctggagaaggggtacagctactccgacgccgtgatcctgggcggcatcaagaacgccttcgggcagcggtgggagaacttctccgacttctacctggagatcgaggacacggtgcggaggatcctgaaggaggacaaccgggagggggaggccatggagaagatcaaggactacctggccgaccccatcaactccttcgggttcagcaacaacgcccccgcgttcacccagctgtaccaccactcccaggaggtggtggagaaggagaagcaggacttcctgcccgagctggagaacctgcggaaccccatcgtgcagcagaccctgcacgagatgcgccggctggtgaacgccctgctggtgaagtacaagaaggaggagcccgggttctccttcgagcggatccacgtggagatgggccgggacctgaagaacaccaagaccaagcggcgcgagctcacccagaagatccgggagaacgagaagaagaacgacgaggcccggaagcggctggaggagttcgggctgcggcccacccgcgacaacctgctgcggtacctgctgtacgacgagatccagaagcacatcagcgggcccgtgctgtgcccctacaccggcaaggtgatctccatgtccgacctgttctccgggggcaacgtggtgcagatcgagcacatcatcccctacagcgtgtccctggacgacagcttcaacaacaagaccatctgcgaggccaacttcaaccgcatgaagggggaaaagaccccctacgagttcttcctggtgaaccccgactacaagctgtgggggatcaacaagtacgagacaaccgaggacgcctggaaggagatctccgagcgggcgttcaacctgctgccctacggcaaggccaagcgcttcacctccaagaagaagttcgagaagtccgacttcatcgagcggcagctgaacgacacccggtacatcagcaagaaggccgtggagctgctgtcctccgtgtgcgacaacgtgcgcatgctgcccggccaggtgaccagcgagctgcggcacctgtggggcatcaacaacatcctgaaccccgtgctgggcatcgagaacttcgatgccgacgtgcaggagtacaagcggatcccctactacgtggtgaccgacgagaacaacaacgtgctgaacatccaccccaagaccaacgaccggccccacgtggagagcgagaacctggtgctcgccgggcgggtgaacaagggcaccttcagcaccaagtacatgcagctgaaggtggacacccccaacctgaaggacggggactactgggccgtggtgaacatctccgagccccacagcttccagaaggtgttcagcgagcggcccagcgacgacgagaaccacatcgtgttcaagggccgcatcgagaagcagttcttcaacaacgacaccatccggaagaagatcaagaccgacgagacagaggacggcacctactgggccaagttctccatcgtgaacaaggagctgaagctggccgagggcaagggcaagctgaagatcgccggcagcaagatcgccctcttcggggaggtgaagaacggccgcttcacctgccacatctaccagtgcgagacaaacatgcccgacggcaagtactgggtcctgctggagctggacttcgacaccatcgacttcatccgggccgtgaacaccaagcccgagatcaacgagcaccagatcctgtcctacgccaccgtggacgagaagggcttcctgaccgccgacaccgaccccggctacaagaagaaggtgaccatctccgccgggcggtactactgcatcttcgacatcaagaccatcgacgagcagctgtaccccatggagaacgaggcccccgccctgagcaagggcacccggatcaaggaggccatcgtctgggtggacgaggccaccggggagatcaagtacgaccccaagaagaaccgggacgaccaccggcaccacgccatcgacgccatcacggtggccctgaccgagcagggctacctgcagcggctgtccacctaccacgccaaggaggagaacgccaagcggggcatcgacaacaccgagaagttccccgagccctgggacggcttctccaacgacgtgaagaaggtggcggccagcctgctgatctcccacaagcagaacaacaaggtgctcaccaagatctccaagaagatccagaagaacggcgaggtgaagaagtccatcggcttcgccgcccggggccagctgcacaaggagacagtgttcggcaagcggcggagccccgggcacagcgagcactcctaccacatccggaaggacatccggggcctgaaggacaagaagcagatcaacaaggtggtggacgacaccatccgggagcggatcttcaaccacctgcgggagaactacggcatcgacaccagcaaggacaacttcagcgtgcccaaggacgccttctacaaggacggggagtactccctgttcctgcccaacaaccggggcggggacagggtccccatcaagaaggtgcgcatgcgggagaacatcgggaacgccatccagctgaagaacaacatcaagcagttcgtgaacccccggaacaaccaccacgtgctgatctacgaggacttcgacggcaacctgcgggagaaggtggagtccttcatcgaggtggtggagcgcaagcggaacggcgacctggtgtaccagctgcccaaggaggacggccggaagatcatcgccaccctggagatcaacgacatgttcctcctgggcctgggcaaggacatcgagatcgacaccgcctccaccgacctcctgtccaagcacctgtaccgggtgcagaaggtgtcctccagctactacaccttccggcaccacctggccagcaccctggacaacaagaacgaggagatctacatccagtccttcggcgcctgggagaagtacaaccccatcaaggtgaagatcgacatcctgggcaacatcaagcggatcaagcggcccgccgccaccaagaaggccggccaggccaagaagaagaaggactacaaggacgacgacgacaagtaa

SEQ ID NO: 694 - DNA, 4536 bp, synthetic construct
  source 1..4536: mol_type = other DNA
atggccccaaagaagaagcggaaagtcatggccaagatcctggggctggacctgggcaccaacagcatcggctgggccgtggtggagctgatcgacggctccttccggctgatcgccaagggcgtgcacatcttccagcgcggctacggcgacgagcaccaggacgtgtcccgggccagcgagcgcacccgggtgcgcagcgcccggaagctgatctaccggcggaagggccggaagatcgacctgctgcgcctgctgggcagcgagtaccaccccttcatcgacgacgagctgacggagtggcacaagaaccgcaagtaccccatccggaccgagatccaggagtggttcaagctgaacccctacgagctgcggaacaacgccatcgaggggcgcaagctgagccgccaggagctcggccggatcttctaccactacacccagcggcgcggcttcaagtccaacaagaaggacatcagctcctactccaacgacgagaagggggtgaagaagaacctgcccaaggacgtgcagtaccacgaggagtacctctccgagttcggggagactcccaagtccaaggtgctgtacgagcggcacaagaacgccgagcggatccggaacacgtccgagaagaacaagatcagccggatcaccctgcaggaggacttcctgcagatctgcaagaagcaggtgctgctggacgagttcaccgaggacgtgcggaagatcatcttcgacgcccggcccctgaagtcccagaagggcaacgtgggcaagtgcgtgttcgagaagaacaagccccgctgccccatctccagcgtggagttcgaggagtaccgcatgtactccttcatcaacaacatcaagatcaagcggaagaacgaggacaagaaggagttccgcagcctgtacgagcagaacgacatcgacaacgccgtggagctcatcatccccctgttctaccgccagaagcccagcttcaagttcgaggacatccaccgcaagctggacaaggccgggctgtacgacttcaactacaaggacatcatgaccgtgtccgggtgccccctgagcgcccacctgaagtccgtgttcggggacaactggaagtccatccgcttcgacaacggcaagaacaagaacggggaggacaagtacatcgagctgaaggacatctggcacatgctgttcgaccactacatgcaggacaaggacgacgagcccctgatccagatcgcccagaccaagctggagctgtccaaggaggagagcgagaagttcatcaaggcccccgtgaagcaggggtacagcaacctgtcctacaaggccatcgagcgcatcctgttcttcctgaagcaggggtaccagaccgacaaggccatcatcctggccaagctgcccgacatcctggccaagcacaacaagcgggactgcatcaaccagatcatcgaggaggtggagaagatcttcgagatctacagccgccgcaagaagcggaacgagatcgtgaacgcctgcatctccgtgttccgctccgacttcaagaacgcccacagcaactacaagctggacgagttcgacaaggagatcgtggtgcagaagatcatcagcatctacgggaacaccacctggagcaactactccctggacgagcagaccgccatcatccgggatgtcgagaacgccttcgagaaccagctgcggagcggcaacatcgggggcacctacaagaagtccatgtccatcaagcagcacgtggagtccttcctgatcgaggagatcgggatcgacaagaacaccgcggccaagctgtaccaccccagcgccatcgacttctaccccatcgtcgagcccgacgtgaacgggaagcggctgctgggcagccccctgaaggactccatcaagaaccccctgttcatgcggagcatgtgcgagctccgcaaggtggtcaacgagctgatcaacaccgacttctacgacgaccgcctgcagtgcatggagcccctgatcgacagcgagacactgatcgtgatcgagacagggcgcgacgtgaacgactacaacatgcggaaggccatcgaccgctaccagaacgagcgggagactgagaacgagttctacgagagcatcctgatcgagttcttcaaggagacaaacaagaaccgcatccccagcgaggacgacaagcggaagctgaagttctgggtggagcagcacgagtccgtggaggagtccgaggacttctacaacaagctggagagccacacctaccagtacaccaagtccgccgacaggatcaagctgcccaaggacgccatcgagaagtaccggctgtggaaggagcagaacgggatctgcatctacaccaagaaccagatctccatctccgacctgttcgacgacaacaagatcgacttcgagcacaccatccccctgagcaagagcttcgacaacagcctggagaacaagaccatctccgaggcctacttcaaccggtacatcaagaagaacaagatcccctacgagctggacaaggagtacatcaacaacgtgtccggcttcatcatccgctgggagaagaagatcgaggagatcgaggagcgcatcgagaacctgaagcgcaaggccaagaacctgcaggacaaggagtccaagaacgagaacatccagcagcggcactacctgcggatgcacctgaagtactggcagaagaaggtgaacaacttcaaggccaaggaggtgaccgacggcttccggaaccggcagctggtggacatcggcatcatcaacaagtacgcccggctgtacctgaagtccaccttcgacaacgtgttctccgtgaacgccagcttcgtggacgactaccgcgccctgatcggctacaagaagaaccgcaacaaccacatccaccacacggtggacgccatcttctgcgcctgcagcgtggagttcgtccgccggaagccccacgccctccggaccctggagaagtactactacctgaaggacgagctgcagaaggccatcctgttcgaggagcagcccaacgagcagaccaagcgcctgaaggaggagctggagatcgtgcacgagaacctggagccctggaagggcttcgccaagcagctcgacgagctgaaggaggagatcctggtgagccaccgctaccgggacaagctgaagaagcagaccaagaagaagatccggatccggggcaagatcgtgcaccgggccgagaagatccagaagctggacgacaacaagatcaaggtggtggagtggaagtacaagaccgacatctacgggaagaagatccccgtgaagggccgcctgaacgacgagaaccccgacttcgtgctgcaccggttccgggacgactccaagatcctcatcgaggtgctgaagtccttcgaggagtgcaaggagaacgagaacaccctggtgctgaaggggtacaagtacgtgcggaacaaggccggggagatcgtgtacgagaaggagccccggtacacctggcacaacgaccgggagggctccctgaccaccggggtgcgggactccctgcacaaggagatgctgtacggccgcgtgaagcggcccgccaagaccgagaacggggagttcgtgaaggactccatcaacggcgtgctgatggaggactggtacgtgaagcggatccccgtggagtccctggacgccaacgacatcaagaacatcgtggacgacggcatcaaggcccgcatccagaagcacggcttcaagaacgtgaagaacaacggggagatcatcctccccgccgaggagaacctgaaggagatgaccatcaagcggctgcggtgccggcagaagaagggccggggcttcctgaacgccatccccctgaaggagaacagccacctgtccgccaagcacgagagccgggtggagcggttcggcaaggactacaagcagatgtcctacgtcgacaacgacgggaactaccagctgggcatctacagcgacggccggaacacccggtacaagttcctgaacaacctggacgccagcgagctgctggtgtccaacgggaaggtggtcaaggtgcaggacaacgagttcttctccgtgcggggcaagaagatcttcctggagctgaagcaggtgctgcaccagaacctgtacgccatcctgctgcagagcaaggagagcatcaacgacgtgaactgggacagccccaacgagctgatgcggcggctgtacgagatcaagtcgttcagcgagagcgacggccgggccaacatcttctgcctgcacaaccagtgcgccgacaacgtgtccaagctggacctgaagatcggggagttcaagctgggcatccccgtggtgaagtacatccgcttccgccacaccaacttcaacgccctgatcgagggcgtggacttcaagctgaccccgctgggggagatcaagcggctgaagaagcggcccgccgccaccaagaaggccggccaggccaagaagaagaaggactacaaggacgacgacgacaagtaa

SEQ ID NO: 695 - DNA, 3324 bp, synthetic construct
  source 1..3324: mol_type = other DNA
atggccccaaagaagaagcggaaagtcatgtcctacatcctgggcctggacctgggggagacatccgtgggctgggccgtgctggaggagcgcggcaacaagcccgtggccctgaaggacgccggggtgcgggtgttccccaagggggccgaggtggacgagaagcgggggatcagcacctccgagtctcagacccggcggcagaagcggtcccagcgccggatcatccggcgccggagcgaccgcaagaaggccctgaagaacctgctgctgagccacgccctgctgcccagcgacaacgagaagcaggagtccctgctgcaggccgacccctacgagatccggacccggggcctggacaccaagctgcggcccgacgagatcggccgcgccctggtgcacatcaaccagcggcgcggcttcaagtccaaccgcaagagcggggacctgaaggaggagggcatcctggccacctccatcgggaccctggccaaggccatggaggagtcccaggcccgcagcttcggggagtacctgtaccggctggacagcgggtacgacaagggcgccggcaaggagaacacccgcgagcggcagggcgtggccctgcggaaccgcgggggcgggtacgagcacctgcccagccgggccatgatcgaggacgagttcaacctgctgtggtccgcccaggccgcccaccaccccggcctgctgaccaaggacctgaagcgggccgtggagggcatcatcttctaccagcggtcctacgccatcagcgaggaccgccgggccagctggggcaagaagttcgtgaacgccaagatggcgccccagctgaagcactgccccctcttccccgaggagtaccgcagccccgccgggacctgggaggcccagcggttccggctgctgaaggaggtgaacaacctggaggtgctggacgagtacggcaagggccggaagctggacaccgccgagcgcaagacgctggtggacgccctcggcatcgaggagaagcagaccttcgtccagctgtccaagctgatcgccctgcccaaggagcaccgcttcaacctggaggccggggagcggaagcacctggacggcaacaagttcgaggtgcagctgatcaagggctactacggcaagaaaaccaagaaggagaaggaggcctggctggccctggacggcgacttcaagggccacctgcgggagctggtggccaacgtggaggacgccgaccagttcaccgagacagccaaggagctgggcctgaccgagaagcagatcgaggggctgcggaccgtgcagcccaccgggaactacctggcctacagctacaaggccatccagaacctgctgcagttcctggaggacggcctggacgagtaccacgccatccagaaggcccgggagcagggcgtgatcccgccctccaacgagcccgacgagtacgacctgctccccctgccgccggacctgcccaaccccatcgtgacccgggccctgcacgagactcggaaggtggtgaacctgctgatcaagacctacggcaagcccagccgcatcgtggtggagctggcccgggaggtgaagcacggccccaagcgccggcagagcatctcccggaccatcgaggagaaccgcaagcggaacgagaaggtgaaggcctggtaccgcgagcacggggtgctgacccccacccgggacgacgtgatcaagtacaagctgtgggaggaccagaaccacctgtgcgtgtacaccggcaagaccatcgaccaggaggacctgctgagcgaccagaacgtggtcgacatcgaccacatcctgccccgcagcaggtccttcgacgacagctaccgcaacaaggtgctgtgcgtcacccaggccaaccgggagaagggccagcgcctgcccgtggagtggctgggcgggcccgggaacgagcggttcgacaagatgctggtgcggctgaagaacatgcccagcatcgggcacgacaagttcgcccgcttcaaccaggagaagatcgacaccgagcacgccatcgcccggcagctggtggacacccagtacatcagccgcgaggcggtggcctacctgaaccagctgttccccaaggagctgcgggtgggggagaaggccgtgggcaccgtgatcggcaagctgacctccgacctgcggcacgtgtggggcctgaacaccatcctgagcgggcaggaggacctgaagaaccgggaggaccaccgccaccacgccctggacgccatcgtggtggcctgcgccacccggaagcacgtccaggagctggccaagcggtccaagtgggggcaggacccctccgaggtgcccccgccctggaagcgcttccgggacgacgtgaagcatatggtggactcccggaagcgcacctggaagctgggggaccaggagatcaccacggaggggatgctggtgtcccaccgggccgagaagaagatcctgggcggcttccaccaggagacaaactacggccccacgcgggaccccgagtggttcgtgcggcgggtcggggtccgctccctgaccgggcccatgatcaagggcatccgggacgacgccatccggcggatcctgaccaagcactgcgaggagaacgggtacaaccccgagcaggacggccggaccatcccgcccaaggtgttccagaccctgcccacgatgccctccggcgtgcccatccgcagcgtgcggatcgtggagcgcaagcagaagggcatcgaggtgttcggcgggaagaacggcatcgccccgcgggccgtcctgctggggaacaaccaccacctggagatggtggagcgggacaacaacggggtgaaggagatgctggtgtgcatcgtccccaccctggaggccgcccgccgctcccgcatccgcaaggagcccatcgtgcagcgggaccacggggagggcatgaccttcaagctctccctggcccgcaaggaggccgtggtgttccacaagaacgggaagcaccacctgtgctacatcaccatcatctccggctcctccaccctgagcaagggctccgggtccatggacctgaccttccggacccacaacgacgcccggatgcccaagaaggacaccaagggcaaggccctgaagatcacccccttcgcccgcatccagtccttcggggcctggcacgagctggagcccatcaaggtggccgtggaccccatcggccgcctgtccaaggccaacgacaagcggcccgccgccaccaagaaggccggccaggccaagaagaagaaggactacaaggacgacgacgacaagtaa

SEQ ID NO: 696 - DNA, 4167 bp, synthetic construct
  source 1..4167: mol_type = other DNA
atggccccaaagaagaagcggaaagtcatgtccaagatcctgggcctggacctgggcaccaactccatcggctgggccgtggtggagacagagaacaacaagaccttctccctgaagaacaagggggtgcggatcttccaggagggcgtgaagatcgagaagggcgtggagggctccaaggccgccgagcggaccggctaccggtccgctcggcggctgaagttccggcgcaagctccggaagatcgaggtcctgaaggccctgatcaagtacgacctgtgcccgcccatcagcggcgacgagctgaacatctggcggtacaagaagatctaccccaccaacaaggagttccgcaactggtggctgaccgacaacaacgacaaccgggccgaccgcaagaagcagaccaagaacccctactactaccggtccaaggtggccaccgaccagctggacctgaccaagcaggaggaccggtacatcctgggccgggccttctaccacatggcccagcggcgggggttcctgtccaaccgcctggagaacaccaaggagtccgacggggccgtgacccagaacatcaagcagatcaaccagcagaagggggacctgaccctgggccagtacttctaccagtgctactgcaagggcgagaagatccggaaccagtacaccgaccgcctggagcactacgagcaggagttcaaccacatctgcaagctgcagggggtcagcgacgagcagaagaacaccctgcacaaggccatcttctaccagcggcccctgaagtcccagaaggggctgatcggcaagtgccccttcgagcccaagaagtcccgggtggccatcagccacccggccttcgaggagtaccgcatgctgtgcttcgtgaacagcatcaagatcaagctgcccgaggacgacaagctgcggttcctgaccgagaaggagcgggagaagatcatccccgtgttctaccgcaagagcaagccccacttcgacttcgaggacatcgccaagcagctggcccccgccaagcagtacaagttctacaaggccaaggacaagaaccccgaggactacctgttcaacttcaacatgaaaaccaccgtgagcgggtgcccagtgtccgcccggctgaagtccatcttcggcgacgagtggaaggagctgcagatcaagcacgagcggaaggaccactccaagtccatcatcgacatctacgacgtgtggcacgtgctgatgacctacgacagcgaggacaagctgttcgagttcgccaagtgcaagctgggcctgggggaggacaagacgaaggagttcgtccagttcaacctcccccagggctacggctccctgagcctgaaggccatcaacaagatcctgcccttcctgcagatgggcctgatctacagccacgccgtgttcctggccaacatggccaacgtgatcccgcccatcctctggaacgacccagagaacaagcagctgatcatcaacgagatcaaggagctgatccagagccagaacgaggagaagcagatcaccgacatcgtgaacggcctgatcaagatcaacaaggacagcaacgccgtgtggtccaacgaggccgagcgggccttcaagaacgacctgctgcagaacatcaaggcctactacggcagcaccaagttcgacagcttctccatcgcccagaagtccagcatcgagactaacgccttcgagctgctcaagacccagatgcagaagaagaacggcgtgggcgagttcgccaaggtgaagcgcatcgacgagcgcatcaaggacttcctgatcgacaacttcaacgacgacatcaagcccgagaacctgtaccaccccagcgccatcgaaaccttcaagcccgcccagaagaacaacgaggacaagtacctgctggggagccccatcaccagcagcgtgcggaaccccatggccatgcgggccctgcaccagctgcggaagctgatcaaccagctgatcaacgacgacgtgatcgatgaggacaccatcatcaacatcgagatggcccgggacctgatgaacgccaacgagcggaaggcgctgcagaactggcagcgccgccgggaggacgagcggaagaagtacgccgccgagatcgtgaagcactacaaggcctccggcatcaacgccgagcccagcaacaacgacatcctgaagtaccagctgtgggaggagcagaaccacatctgcctgtacaccggcaagaacatcgccctgcaccagttcctgggcagcaaccccgagttcgacatcgagcacaccatcccccagagcctgagcttcgacaactcccaggtgaacatcaccctgtgcgacagcaagtacaaccgcaccgtgaagcggaacaagatcccctacgagctgaacaaccccgacatcctgctgcggatccaccactggaagaaggagtacgagaacatcgacaaggacatccagaagtgcatcaagaacgcccggggcgcctccaccaaggaggacaaggaccggcacatcatccgccggcaccagctgaccacccagcggaactacatccgggagaagtaccagagcttcacccggaaggacgtgcccagcggcttcaagaacagccagctggtggacatcgggctgatcaccaagtacgcccggctgtacctcaagaccgtgttcgaccgggtgaacacggtcaaggggaccaccgtggccgacttccggaagctgtggggcctgcagaacgcctacgagacaaaggcccgggtgaaccacatccaccactgcatcgacgccatcaccatcgcctgcatgaccaagccccagtacgacaagctggccaagttctaccacgactgggagtgcctgaaggaggagggcgtcgacaagaagcccgtgttcgagaagccctggcccaccttcaccgaggacgtgaaggggatcgagaacgagatcctgatctcccactacacccccgacagcttcgccaagcagagcaagaagctgctgcggaagcgggggatcatccagaaggacaagaacgggaaccccatcgtgctgaagggggacaccgtgcggggcagcctgcacaaggagacattctacggggccatcgagcgcacccaggccaacaagaagggcgagctggagaaggtgatcaagtacgtggtgcggaagaaggtgagcgacctgtccgacaccgacgtgaagaacatcgtggacgaccgcatccgggagatcgtgggcaacgcccgcaacgaggagaagaagatccagaaggagatcgagcggctgaagaaggacctgcagaaggccgaggagcacgaggagcccgccatcaacgacaagatctgcgtgctccagaccgagatcgagcagctgtactccctgcccaacaagaagggggcccccatccccatcaagaaggtgcggctgctccagcccagcgtcaccaaccccctctgcatcaagaagcagagggacgtgtccaccaagaagcccaaggagtacaagcagaactactacgccgccaacgacggcaactacctgatggccatctacgagggcaaggacgccaagggcaagatcaagcgggacttcgagatcgtgaacaacatcaccgccggcgagttcttcaagcagtccgtgcagggggacctgaagccccagggcatcagcaccaacggcgggctgatccccaagcagaaggagaacgggaagctggtgctgccctacaagagcagcatcaagatcgggacgatgatcatcctgtgggagaagtctcccacagaggtgttcgacctggagctgaacgagatcaagcggcggctctacaaggtcgtgggcctgagcgcccagaagctgaagatcagcggcaagtcctacaactacgccaccatcgtgctgcggcaccaccaggaggccagcagcagcagcgacctcaagacctacgatggggcgttcaagcgggacgagacatacatgggccagcggaagctgaaccacaaccagttcaacgccctggtggagaacatcgacttcgacatgaacaccaagggcaccatcaagtggatcaagcacaagcggcccgccgccaccaagaaggccggccaggccaagaagaagaaggactacaaggacgacgacgacaagtaa

SEQ ID NO: 697 - DNA, 4008 bp, synthetic construct
  source 1..4008: mol_type = other DNA
atggccccaaagaagaagcggaaagtcatggccaaggtgctggggctggacctcggcaccaacagcatcggctgggccgtggtggaaaccgaggacaacaagaacttcgagctgtgcgagaagggcgtgcgcatcttccaggagggcgtgaagatcgagaaggggatcgagggctccaaggccgaggagcgcacgcgctaccgcagcgcccgccggctgaagttccggcggaagctgcggaagatcaacaccatcaaggccctgatggaggccgactactgccccaagctgagcgacgaggagctgaacaactggcggttcagcaaggtgtaccccaccaacgtggagttccgcacctggctgctgaccaacgacagcctgaacaagaacccctacttctaccgcaacctgggggtgacccggaacctggacctgtcccagaaggagaaccggtacaagatcggccgggccttctaccacctgtcccagcggcggggcttcctgtccaaccgcctggaggggaccaaggagagcgacggggccatcaagaaggagatctccgagctgacccaggagaagaaggacaagaccctggggcagtacttctacgccaagtacaacaacggcgagaagatccgggaccactacacccaccgggaggaccactacctggaggagttccggcggatctgcaaggtgcagaagatcgactccgggttcaagtccgacctggagaaggccatcttctaccagcggcccctgaagtcccagaaggggctgatcgggaagtgccccttcgagaagaacaagccccggtgctccgtgagccaccccctgttcgaggagtaccgcatgctgtgcttcatcaacaacatcaagatcaagacccccgacgacgagaagctgcgcttcctgaaccccctggagaagaaggagatcgagcccctgttctaccgcaagagcaaggagcacttcgacttcgaggacatcgccaagctgctggcccccaagaagcagtacaagtactacaagtcccgggagaagcactccgaggactacctgttcaactacagcatgaaaaccaccgtgagcgggtgccccgtgagcgcccgcttcgagtccatcttcgggaagaactggaaggacctgaagatcgagcacacccggaagaacgacgggaagctctccttcatcgacatctacgacgtgtggcacgtcctgttcaccttcgacaacgaggagaagctgaccgagttcgcccaggccaagctgtgcctgcaggacgagaagctgaaggagttcgtgcacaagatccacctgaagcacgactacgccagcctctccctgaaggccatcaagaaggtgctgccctacctgcgggagggcctgatctacagccacgccatcttcctggggaacatgggcaacgccatctcccaggagatctggtcccaggaggagaaccgcaagatcatccagcaggagatcctggagatcatcaagaaccagaaccaggagaagcagatcatcgaggtggtgaacggcctgatcaagaagtgcaaggacaacaagtggtactggtccgaggaggccaaggagaagtacaagaaggacatcgagaagaacatcatctcggtgttcggcacctcccgctggaacaagctggagttcgagatccagaacgacatcgtgaacaacgccctgaacaagttcaaggagcagatccagaagcagaacggcaagagcggcttcctgcagatcgagacaatcgacgagcgggtgaagtccttcctggtgggcaacttcgacgccgagaaggaggacctcgagaagctgtaccaccccagcgccatcgaggtgttcaagcagcccctgcgggccgaggacgggcgcaagtacctgggcagcccgatggtgtcctccgtgcgcaaccccatggccatgcgggccctgcaccagctgcgcaagctgatcaacgagctgatcaagcaggacatcatcgacgagcggaccaagatcaacatcgagatgtcccgggacctgaagaacgccaacgagcggaaggccctgcagagctggcagcgggaccgggagaagctccacaaggagtactcctcccggatccaggagcacttcaactccgagggcatcaagcgggagccctccgacgacgacatcctgaagtaccagctgtgggaggagcaggagcacaagtgcgtgtacaccggctcctccatcggggtgtccgacttcctggggaacagccccagcttcgacatcgagcacaccatcccccgctccctgtccttcgacaacagccagcagaacaagacgctgtgccagtcccggttcaaccgcaacaccaagcggaacaagatccccagcgagctgagcaaccaccacgagatcctggagcggatcgagaactggaagaagaagtacgaggagctcgacaagcagatccagaagcaggtgatccgctccaagaccgccgccaccaaggacagcaaggactccgccatccagcggcggcacaagctggtggaggagcggaactactggaagggcaagtacgagaagttcgccatgatcgacgtgccctccggcttcaagaacagccagatggtggacatcggcatcatcaccaagtactcccggctgtacctcaagaccctgttcgacaaggtgtacaccgtgaagggcaacaccgtggccgacttccgggtcatctggggcctgcagaaggagtacgagaagaaggcccgggtgaaccacatccaccactgcatcgacgccatcaccatcgcctgcatgtccaagcagaactacgacaacctggccaagttctaccacgagagcgaggagcggtccatcgccggggacaacaagaagccccacgtggccaagccctggcccaccttcagcgaggacgtgaagggggtggagaaggaggtgctgatctcccactacacccccgacaacctgcacaagcagagcaagaagaagctgcggaaccgcggcaagatcgagaagaacatccagggcgagatcatctaccagaagggcgacaccgtgcgggggtccctgcacaaggagactttctacggcgccatcaagcgggagatcaccaacaagaagggggagaaggaggagaaggtgctgtacgtggtgcggaagcccatcgactccctgtccgccggcgacatcaagaacatcgtggaccacacggtccgcgagaaggtgcaggccgccatcaacgagaaggggatcaagcaggccctgaacgagacaatctggatgaaccaggagaagcagatccccatcaagaaggtgcggtgctacgcccccaccgtgaccaagcccatccacctgaagaaccaccgggacctgtccaagcacgactacaagcactcctaccacgtggccaacgacggcaactacctgatggccatctacgagggggaggacgacaagggcaaggtcaagcgggacttcgagatcgtgaacaacctgaaggccggggagtacttcaagcagagcgtgcaggaggtgctgaaggcccaggggatcaaccacctggagggcctggtgccgccctccaagtacatcaagaacgtggaggccccgctgaagcagatcatcaagaccggcacgatggtgctgctgtgggaggaaacctccgacgagatctgggagctggacaacaaccagaagaacatccggctctacaagatcgtgaagttcgacaagagcggccggatctacttccggccccacaacgaggcccggcccgcctccgagctgaaggaggtgtacaacctgaacgccaacaagcagtgcgagcagctgcggctgcccgtgaacaagttcaacgccctggtggagggctacgacttcaagatcaacgtgctgggccagatcgagaagctgaagaagcggcccgccgccaccaagaaggccggccaggccaagaagaagaaggactacaaggacgacgacgacaagtaa

SEQ ID NO: 698-703 - skipped (6 entries)

SEQ ID NO: 704 - DNA, 33 bp, synthetic construct
  source 1..33: mol_type = other DNA
caaagtacctagagagtgccttgcagtgaatag

SEQ ID NO: 705 - DNA, 10 bp, synthetic construct
  source 1..10: mol_type = other DNA
taggtacttt

SEQ ID NO: 706 - RNA, 167 nt, synthetic construct
  source 1..167: mol_type = other RNA
ttcactgcaaggcactctctagtttgagaatggtgtaattctgtatgtagtcaagaaattgactaccatacaagattacaccataagttcaaataaagattttatccaaatcgtcatgtttacatgaccccacagtgtgtggattaaacttgcttcggcaagttttt

SEQ ID NO: 707-710 - skipped (4 entries)

SEQ ID NO: 711 - protein, 1376 aa, synthetic construct
MAPKKKRKVMSIAEKNNSEYYLGLDIGTDSVGWAVTDLDYNIQKFNGKAMWGIRLFEAGKTAAERRVFRTTRRRIQRRKHRIELLQELFDSEISKADTNFYLRLKESKYWVEDRTLGQTNILFNDPEYTDKDYYKQYPTIYHLRKELMTSDEPHDVRLVYLAIHHLIKNRGHFLFEGEGRKDVSSFKVIFRELCQSMHDEMEIVLEAADLDEVEAVLKNREYGITDKKTRLNKLLTIDDEHKKEQKSIIALLAGGKTKVDALFGEKTSEDSDVKDITFAGDKFEESFDALSIMLGDKMFCLEKMKAIYDWSILEEILQGEDYLSYAKVATYEKHKNDLATLKKIMKKYRSDEYDACFKDPGKKDNYCAYVGMAKKGKKKLVLEKKCSQEDLCKYLGKVFKDVKQNDPDLQYLMAEIQRGTLLPKQVNKDNGVIPHQLHLEELRMILANVKKYLEFLNDKDDSGFTVSEKIEKIFAFRIPYYVGPLNAHHKSLGHCWIVRNKGMENQKVLPWNFDEIVNLEASATAFIRKMTSKCTYVIGADVVPKNSLVYSEFMVLNELNNVKVNGELLPVELKEKVFEEVFKRVKRVTGKRLRDFLIAEGAFKKGDELSGFDQNFKGSLTAYLDFKRILGEKKIPKEAIEEMIQAIVLFGDDRKLLKRRVEKRYGELLSKEEIAAICKLKYTGWGRLSREFLEEIYVVNHKTGEMINIISMMHGTNANLMQLLSSEYRFTEALEAYNEERQTDHSDIAYGIVKDLYVSPAVRRSIWQSLKIVKEIAKIKKAAPKKVFVEVARENAEKKRTVSRKNALIALYKNCKEEERDWIAELDAKTDHELRRDRLYLYYTQMGRCMYTGKPIDLNRLFDTNVYDVDHIFPQSKIKDDSLSNRVLVERKVNAKKSDVYPLPEEIRNKNRGFWTMLHRKELISKRKYDRLTRVTPFSDSELADFIARQLVETRQSTKAVAQVLKKVFPDTDVVYVKAGNVSRFRYDFKMIKVREVNDYHHAKDAYLNIVVGNVYDTKFTKSPLNFIQGKDGKNYSLNQMFNYDVERSGVIAWKAGEKGTITTVKRMMKKNNIQFTRHAFEVKGGLFDQTIMKKGKGQVPIKSSDVHLSDISKYGGYNKAAGAYFFLVEHTVKKKRIRTLEFAPVYLAKKLENRSALLEYCKNELNLLESRILLPKVKINTMFEIDGFKMHISGRTGKQVIFKGAEQLCISEQYGLDIKKINKYIQRCKLARENLPVTAFDGISTHNNDVLYSVMMQKLKDTVYGIHLSSQLKNLEKGKEVFGKLSLKEQCEVLMEALNLFSCNSLSANFKLINSGASCGTLQLSNNFSNRKSFILYNQSITGLFEQKVDLLRLAATKKAGQAKKKKDYKDDDDK

SEQ ID NO: 712 - protein, 1376 aa, synthetic construct
MAPKKKRKVMSIAEKNNSEYYLGLDIGTDSVGWAVTDLDYNIQKFNGKAMWGIRLFEAGKTAAERRVFRTTRRRIQRRKHRIELLQELFDSEISKADTNFYLRLKESKYWVEDRTLGQTNILFNDPEYTDKDYYKQYPTIYHLRKELMTSDEPHDVRLVYLAIHHLIKNRGHFLFEGEGRKDVSSFKVIFRELCQSMHDEMEIVLEAADLDEVEAVLKNREYGITDKKTRLNKLLTIDDEHKKEQKSIIALLAGGKTKVDALFGEKTSEDSDVKDITFAGDKFEESFDALSIMLGDKMFCLEKMKAIYDWSILEEILQGEDYLSYAKVATYEKHKNDLATLKKIMKKYRSDEYDACFKDPGKKDNYCAYVGMAKKGKKKLVLEKKCSQEDLCKYLGKVFKDVKQNDPDLQYLMAEIQRGTLLPKQVNKDNGVIPHQLHLEELRMILANVKKYLEFLNDKDDSGFTVSEKIEKIFAFRIPYYVGPLNAHHKSLGHCWIVRNKGMENQKVLPWNFDEIVNLEASATAFIRKMTSKCTYVIGADVVPKNSLVYSEFMVLNELNNVKVNGELLPVELKEKVFEEVFKRVKRVTGKRLRDFLIAEGAFKKGDELSGFDQNFKGSLTAYLDFKRILGEKKIPKEAIEEMIQAIVLFGDDRKLLKRRVEKRYGELLSKEEIAAICKLKYTGWGRLSREFLEEIYVVNHKTGEMINIISMMHGTNANLMQLLSSEYRFTEALEAYNEERQTDHSDIAYGIVKDLYVSPAVRRSIWQSLKIVKEIAKIKKAAPKKVFVEVARENAEKKRTVSRKNALIALYKNCKEEERDWIAELDAKTDHELRRDRLYLYYTQMGRCMYTGKPIDLNRLFDTNVYDVDHIFPQSKIKDDSLSNRVLVERKVNAKKSDVYPLPEEIRNKNRGFWTMLHRKELISKRKYDRLTRVTPFSDSELADFIARQLVETRQSTKAVAQVLKKVFPDTDVVYVKAGNVSRFRYDFKMIKVREVNDYHHAKDAYLNIVVGNVYDTKFTKSPLNFIQGKDGKNYSLNQMFNYDVERSGVIAWKAGEKGTITTVKRMMKKNNIQFTRHAFEVKGGLFDQTIMKKGKGQVPIKSSDVHLSDISKYGGYNKAAGAYFFLVEHTVKKKRIRTLEFAPVYLAKKLENRSALLEYCKNELNLLESRILLPKVKINTMFEIDGFKMHISGRTGKQVIFKGAEQLCISEQYGLDIKKINKYIQRCKLARENLPVTAFDGISTHNNDVLYSVMMQKLKDTVYGIHLSSQLKNLEKGKEVFGKLSLKEQCEVLMEALNLFSCNSLSANFKLINSGASCGTLNLSNNFSNRKSFILYNQSITGLFEQKVDLLRLAATKKAGQAKKKKDYKDDDDK

SEQ ID NO: 713 - protein, 1376 aa, synthetic construct
MAPKKKRKVMSIAEKNNSEYYLGLDIGTDSVGWAVTDLDYNIQKFNGKAMWGIRLFEAGKTAAERRVFRTTRRRIQRRKHRIELLQELFDSEISKADTNFYLRLKESKYWVEDRTLGQTNILFNDPEYTDKDYYKQYPTIYHLRKELMTSDEPHDVRLVYLAIHHLIKNRGHFLFEGEGRKDVSSFKVIFRELCQSMHDEMEIVLEAADLDEVEAVLKNREYGITDKKTRLNKLLTIDDEHKKEQKSIIALLAGGKTKVDALFGEKTSEDSDVKDITFAGDKFEESFDALSIMLGDKMFCLEKMKAIYDWSILEEILQGEDYLSYAKVATYEKHKNDLATLKKIMKKYRSDEYDACFKDPGKKDNYCAYVGMAKKGKKKLVLEKKCSQEDLCKYLGKVFKDVKQNDPDLQYLMAEIQRGTLLPKQVNKDNGVIPHQLHLEELRMILANVKKYLEFLNDKDDSGFTVSEKIEKIFAFRIPYYVGPLNAHHKSLGHCWIVRNKGMENQKVLPWNFDEIVNLEASATAFIRKMTSKCTYVIGADVVPKNSLVYSEFMVLNELNNVKVNGELLPVELKEKVFEEVFKRVKRVTGKRLRDFLIAEGAFKKGDELSGFDQNFKGSLTAYLDFKRILGEKKIPKEAIEEMIQAIVLFGDDRKLLKRRVEKRYGELLSKEEIAAICKLKYTGWGRLSREFLEEIYVVNHKTGEMINIISMMHGTNANLMQLLSSEYRFTEALEAYNEERQTDHSDIAYGIVKDLYVSPAVRRSIWQSLKIVKEIAKIKKAAPKKVFVEVARENAEKKRTVSRKNALIALYKNCKEEERDWIAELDAKTDHELRRDRLYLYYTQMGRCMYTGKPIDLNRLFDTNVYDVDHIFPQSKIKDDSLSNRVLVERKVNAKKSDVYPLPEEIRNKNRGFWTMLHRKELISKRKYDRLTRVTPFSDSELADFIARQLVETRQSTKAVAQVLKKVFPDTDVVYVKAGNVSRFRYDFKMIKVREVNDYHHAKDAYLNIVVGNVYDTKFTKSPLNFIQGKDGKNYSLNQMFNYDVERSGVIAWKAGEKGTITTVKRMMKKNNIQFTRHAFEVKGGLFDQTIMKKGKGQVPIKSSDVHLSDISKYGGYNKAAGAYFFLVEHTVKKKRIRTLEFAPVYLAKKLENRSALLEYCKNELNLLESRILLPKVKINTMFEIDGFKMHISGRTGKQVIFKGAEQLCISEQYGLDIKKINKYIQRCKLARENLPVTAFDGISTHNNDVLYSVMMQKLKDTVYGIHLSSQLKNLEKGKEVFGKLSLKEQCEVLMEALNLFSCNSLSANFKLINSGASCGTLTLSNNFSNRKSFILYNQSITGLFEQKVDLLRLAATKKAGQAKKKKDYKDDDDK

SEQ ID NO: 714 - protein, 1376 aa, synthetic construct
MAPKKKRKVMSIAEKNNSEYYLGLDIGTDSVGWAVTDLDYNIQKFNGKAMWGIRLFEAGKTAAERRVFRTTRRRIQRRKHRIELLQELFDSEISKADTNFYLRLKESKYWVEDRTLGQTNILFNDPEYTDKDYYKQYPTIYHLRKELMTSDEPHDVRLVYLAIHHLIKNRGHFLFEGEGRKDVSSFKVIFRELCQSMHDEMEIVLEAADLDEVEAVLKNREYGITDKKTRLNKLLTIDDEHKKEQKSIIALLAGGKTKVDALFGEKTSEDSDVKDITFAGDKFEESFDALSIMLGDKMFCLEKMKAIYDWSILEEILQGEDYLSYAKVATYEKHKNDLATLKKIMKKYRSDEYDACFKDPGKKDNYCAYVGMAKKGKKKLVLEKKCSQEDLCKYLGKVFKDVKQNDPDLQYLMAEIQRGTLLPKQVNKDNGVIPHQLHLEELRMILANVKKYLEFLNDKDDSGFTVSEKIEKIFAFRIPYYVGPLNAHHKSLGHCWIVRNKGMENQKVLPWNFDEIVNLEASATAFIRKMTSKCTYVIGADVVPKNSLVYSEFMVLNELNNVKVNGELLPVELKEKVFEEVFKRVKRVTGKRLRDFLIAEGAFKKGDELSGFDQNFKGSLTAYLDFKRILGEKKIPKEAIEEMIQAIVLFGDDRKLLKRRVEKRYGELLSKEEIAAICKLKYTGWGRLSREFLEEIYVVNHKTGEMINIISMMHGTNANLMQLLSSEYRFTEALEAYNEERQTDHSDIAYGIVKDLYVSPAVRRSIWQSLKIVKEIAKIKKAAPKKVFVEVARENAEKKRTVSRKNALIALYKNCKEEERDWIAELDAKTDHELRRDRLYLYYTQMGRCMYTGKPIDLNRLFDTNVYDVDHIFPQSKIKDDSLSNRVLVERKVNAKKSDVYPLPEEIRNKNRGFWTMLHRKELISKRKYDRLTRVTPFSDSELADFIARQLVETRQSTKAVAQVLKKVFPDTDVVYVKAGNVSRFRYDFKMIKVREVNDYHHAKDAYLNIVVGNVYDTKFTKSPLNFIQGKDGKNYSLNQMFNYDVERSGVIAWKAGEKGTITTVKRMMKKNNIQFTRHAFEVKGGLFDQTIMKKGKGQVPIKSSDVHLSDISKYGGYNKANGAYFFLVEHTVKKKRIRTLEFAPVYLAKKLENRSALLEYCKNELNLLESRILLPKVKINTMFEIDGFKMHISGRTGKQVIFKGAEQLCISEQYGLDIKKINKYIQRCKLARENLPVTAFDGISTHNNDVLYSVMMQKLKDTVYGIHLSSQLKNLEKGKEVFGKLSLKEQCEVLMEALNLFSCNSLSANFKLINSGASCGTLKLSNNFSNRKSFILYNQSITGLFEQKVDLLRLAATKKAGQAKKKKDYKDDDDK

SEQ ID NO: 715 - protein, 1376 aa, synthetic construct
MAPKKKRKVMSIAEKNNSEYYLGLDIGTDSVGWAVTDLDYNIQKFNGKAMWGIRLFEAGKTAAERRVFRTTRRRIQRRKHRIELLQELFDSEISKADTNFYLRLKESKYWVEDRTLGQTNILFNDPEYTDKDYYKQYPTIYHLRKELMTSDEPHDVRLVYLAIHHLIKNRGHFLFEGEGRKDVSSFKVIFRELCQSMHDEMEIVLEAADLDEVEAVLKNREYGITDKKTRLNKLLTIDDEHKKEQKSIIALLAGGKTKVDALFGEKTSEDSDVKDITFAGDKFEESFDALSIMLGDKMFCLEKMKAIYDWSILEEILQGEDYLSYAKVATYEKHKNDLATLKKIMKKYRSDEYDACFKDPGKKDNYCAYVGMAKKGKKKLVLEKKCSQEDLCKYLGKVFKDVKQNDPDLQYLMAEIQRGTLLPKQVNKDNGVIPHQLHLEELRMILANVKKYLEFLNDKDDSGFTVSEKIEKIFAFRIPYYVGPLNAHHKSLGHCWIVRNKGMENQKVLPWNFDEIVNLEASATAFIRKMTSKCTYVIGADVVPKNSLVYSEFMVLNELNNVKVNGELLPVELKEKVFEEVFKRVKRVTGKRLRDFLIAEGAFKKGDELSGFDQNFKGSLTAYLDFKRILGEKKIPKEAIEEMIQAIVLFGDDRKLLKRRVEKRYGELLSKEEIAAICKLKYTGWGRLSREFLEEIYVVNHKTGEMINIISMMHGTNANLMQLLSSEYRFTEALEAYNEERQTDHSDIAYGIVKDLYVSPAVRRSIWQSLKIVKEIAKIKKAAPKKVFVEVARENAEKKRTVSRKNALIALYKNCKEEERDWIAELDAKTDHELRRDRLYLYYTQMGRCMYTGKPIDLNRLFDTNVYDVDHIFPQSKIKDDSLSNRVLVERKVNAKKSDVYPLPEEIRNKNRGFWTMLHRKELISKRKYDRLTRVTPFSDSELADFIARQLVETRQSTKAVAQVLKKVFPDTDVVYVKAGNVSRFRYDFKMIKVREVNDYHHAKDAYLNIVVGNVYDTKFTKSPLNFIQGKDGKNYSLNQMFNYDVERSGVIAWKAGEKGTITTVKRMMKKNNIQFTRHAFEVKGGLFDQTIMKKGKGQVPIKSSDVHLSDISKYGGYNKAKGAYFFLVEHTVKKKRIRTLEFAPVYLAKKLENRSALLEYCKNELNLLESRILLPKVKINTMFEIDGFKMHISGRTGKQVIFKGAEQLCISEQYGLDIKKINKYIQRCKLARENLPVTAFDGISTHNNDVLYSVMMQKLKDTVYGIHLSSQLKNLEKGKEVFGKLSLKEQCEVLMEALNLFSCNSLSANFKLINSGASCGTLKLSNNFSNRKSFILYNQSITGLFEQKVDLLRLAATKKAGQAKKKKDYKDDDDK

SEQ ID NO: 716 - protein, 1376 aa, synthetic construct
MAPKKKRKVMSIAEKNNSEYYLGLDIGTDSVGWAVTDLDYNIQKFNGKAMWGIRLFEAGKTAAERRVFRTTRRRIQRRKHRIELLQELFDSEISKADTNFYLRLKESKYWVEDRTLGQTNILFNDPEYTDKDYYKQYPTIYHLRKELMTSDEPHDVRLVYLAIHHLIKNRGHFLFEGEGRKDVSSFKVIFRELCQSMHDEMEIVLEAADLDEVEAVLKNREYGITDKKTRLNKLLTIDDEHKKEQKSIIALLAGGKTKVDALFGEKTSEDSDVKDITFAGDKFEESFDALSIMLGDKMFCLEKMKAIYDWSILEEILQGEDYLSYAKVATYEKHKNDLATLKKIMKKYRSDEYDACFKDPGKKDNYCAYVGMAKKGKKKLVLEKKCSQEDLCKYLGKVFKDVKQNDPDLQYLMAEIQRGTLLPKQVNKDNGVIPHQLHLEELRMILANVKKYLEFLNDKDDSGFTVSEKIEKIFAFRIPYYVGPLNAHHKSLGHCWIVRNKGMENQKVLPWNFDEIVNLEASATAFIRKMTSKCTYVIGADVVPKNSLVYSEFMVLNELNNVKVNGELLPVELKEKVFEEVFKRVKRVTGKRLRDFLIAEGAFKKGDELSGFDQNFKGSLTAYLDFKRILGEKKIPKEAIEEMIQAIVLFGDDRKLLKRRVEKRYGELLSKEEIAAICKLKYTGWGRLSREFLEEIYVVNHKTGEMINIISMMHGTNANLMQLLSSEYRFTEALEAYNEERQTDHSDIAYGIVKDLYVSPAVRRSIWQSLKIVKEIAKIKKAAPKKVFVEVARENAEKKRTVSRKNALIALYKNCKEEERDWIAELDAKTDHELRRDRLYLYYTQMGRCMYTGKPIDLNRLFDTNVYDVDHIFPQSKIKDDSLSNRVLVERKVNAKKSDVYPLPEEIRNKNRGFWTMLHRKELISKRKYDRLTRVTPFSDSELADFIARQLVETRQSTKAVAQVLKKVFPDTDVVYVKAGNVSRFRYDFKMIKVREVNDYHHAKDAYLNIVVGNVYDTKFTKSPLNFIQGKDGKNYSLNQMFNYDVERSGVIAWKAGEKGTITTVKRMMKKNNIQFTRHAFEVKGGLFDQTIMKKGKGQVPIKSSDVHLSDISKYGGYNKARGAYFFLVEHTVKKKRIRTLEFAPVYLAKKLENRSALLEYCKNELNLLESRILLPKVKINTMFEIDGFKMHISGRTGKQVIFKGAEQLCISEQYGLDIKKINKYIQRCKLARENLPVTAFDGISTHNNDVLYSVMMQKLKDTVYGIHLSSQLKNLEKGKEVFGKLSLKEQCEVLMEALNLFSCNSLSANFKLINSGASCGTLKLSNNFSNRKSFILYNQSITGLFEQKVDLLRLAATKKAGQAKKKKDYKDDDDK

SEQ ID NO: 717 - protein, 1376 aa, synthetic construct
MAPKKKRKVMSIAEKNNSEYYLGLDIGTDSVGWAVTDLDYNIQKFNGKAMWGIRLFEAGKTAAERRVFRTTRRRIQRRKHRIELLQELFDSEISKADTNFYLRLKESKYWVEDRTLGQTNILFNDPEYTDKDYYKQYPTIYHLRKELMTSDEPHDVRLVYLAIHHLIKNRGHFLFEGEGRKDVSSFKVIFRELCQSMHDEMEIVLEAADLDEVEAVLKNREYGITDKKTRLNKLLTIDDEHKKEQKSIIALLAGGKTKVDALFGEKTSEDSDVKDITFAGDKFEESFDALSIMLGDKMFCLEKMKAIYDWSILEEILQGEDYLSYAKVATYEKHKNDLATLKKIMKKYRSDEYDACFKDPGKKDNYCAYVGMAKKGKKKLVLEKKCSQEDLCKYLGKVFKDVKQNDPDLQYLMAEIQRGTLLPKQVNKDNGVIPHQLHLEELRMILANVKKYLEFLNDKDDSGFTVSEKIEKIFAFRIPYYVGPLNAHHKSLGHCWIVRNKGMENQKVLPWNFDEIVNLEASATAFIRKMTSKCTYVIGADVVPKNSLVYSEFMVLNELNNVKVNGELLPVELKEKVFEEVFKRVKRVTGKRLRDFLIAEGAFKKGDELSGFDQNFKGSLTAYLDFKRILGEKKIPKEAIEEMIQAIVLFGDDRKLLKRRVEKRYGELLSKEEIAAICKLKYTGWGRLSREFLEEIYVVNHKTGEMINIISMMHGTNANLMQLLSSEYRFTEALEAYNEERQTDHSDIAYGIVKDLYVSPAVRRSIWQSLKIVKEIAKIKKAAPKKVFVEVARENAEKKRTVSRKNALIALYKNCKEEERDWIAELDAKTDHELRRDRLYLYYTQMGRCMYTGKPIDLNRLFDTNVYDVDHIFPQSKIKDDSLSNRVLVERKVNAKKSDVYPLPEEIRNKNRGFWTMLHRKELISKRKYDRLTRVTPFSDSELADFIARQLVETRQSTKAVAQVLKKVFPDTDVVYVKAGNVSRFRYDFKMIKVREVNDYHHAKDAYLNIVVGNVYDTKFTKSPLNFIQGKDGKNYSLNQMFNYDVERSGVIAWKAGEKGTITTVKRMMKKNNIQFTRHAFEVKGGLFDQTIMKKGKGQVPIKSSDVHLSDISKYGGYNKAAGAYFFLVEHTVKKKRIRTLEFAPVYLAKKLENRSALLEYCKNELNLLESRILLPKVKINTMFEIDGFKMHISGRTGKNVIFKGAEQLCISEQYGLDIKKINKYIQRCKLARENLPVTAFDGISTHNNDVLYSVMMQKLKDTVYGIHLSSQLKNLEKGKEVFGKLSLKEQCEVLMEALNLFSCNSLSANFKLINSGASCGTLKLSNNFSNRKSFILYNQSITGLFEQKVDLLRLAATKKAGQAKKKKDYKDDDDK

SEQ ID NO: 718 - protein, 1376 aa, synthetic construct
MAPKKKRKVMSIAEKNNSEYYLGLDIGTDSVGWAVTDLDYNIQKFNGKAMWGIRLFEAGKTAAERRVFRTTRRRIQRRKHRIELLQELFDSEISKADTNFYLRLKESKYWVEDRTLGQTNILFNDPEYTDKDYYKQYPTIYHLRKELMTSDEPHDVRLVYLAIHHLIKNRGHFLFEGEGRKDVSSFKVIFRELCQSMHDEMEIVLEAADLDEVEAVLKNREYGITDKKTRLNKLLTIDDEHKKEQKSIIALLAGGKTKVDALFGEKTSEDSDVKDITFAGDKFEESFDALSIMLGDKMFCLEKMKAIYDWSILEEILQGEDYLSYAKVATYEKHKNDLATLKKIMKKYRSDEYDACFKDPGKKDNYCAYVGMAKKGKKKLVLEKKCSQEDLCKYLGKVFKDVKQNDPDLQYLMAEIQRGTLLPKQVNKDNGVIPHQLHLEELRMILANVKKYLEFLNDKDDSGFTVSEKIEKIFAFRIPYYVGPLNAHHKSLGHCWIVRNKGMENQKVLPWNFDEIVNLEASATAFIRKMTSKCTYVIGADVVPKNSLVYSEFMVLNELNNVKVNGELLPVELKEKVFEEVFKRVKRVTGKRLRDFLIAEGAFKKGDELSGFDQNFKGSLTAYLDFKRILGEKKIPKEAIEEMIQAIVLFGDDRKLLKRRVEKRYGELLSKEEIAAICKLKYTGWGRLSREFLEEIYVVNHKTGEMINIISMMHGTNANLMQLLSSEYRFTEALEAYNEERQTDHSDIAYGIVKDLYVSPAVRRSIWQSLKIVKEIAKIKKAAPKKVFVEVARENAEKKRTVSRKNALIALYKNCKEEERDWIAELDAKTDHELRRDRLYLYYTQMGRCMYTGKPIDLNRLFDTNVYDVDHIFPQSKIKDDSLSNRVLVERKVNAKKSDVYPLPEEIRNKNRGFWTMLHRKELISKRKYDRLTRVTPFSDSELADFIARQLVETRQSTKAVAQVLKKVFPDTDVVYVKAGNVSRFRYDFKMIKVREVNDYHHAKDAYLNIVVGNVYDTKFTKSPLNFIQGKDGKNYSLNQMFNYDVERSGVIAWKAGEKGTITTVKRMMKKNNIQFTRHAFEVKGGLFDQTIMKKGKGQVPIKSSDVHLSDISKYGGYNKAAGAYFFLVEHTVKKKRIRTLEFAPVYLAKKLENRSALLEYCKNELNLLESRILLPKVKINTMFEIDGFKMHISGRTGKKVIFKGAEQLCISEQYGLDIKKINKYIQRCKLARENLPVTAFDGISTHNNDVLYSVMMQKLKDTVYGIHLSSQLKNLEKGKEVFGKLSLKEQCEVLMEALNLFSCNSLSANFKLINSGASCGTLKLSNNFSNRKSFILYNQSITGLFEQKVDLLRLAATKKAGQAKKKKDYKDDDDK

SEQ ID NO: 719 - protein, 1376 aa, synthetic construct
MAPKKKRKVMSIAEKNNSEYYLGLDIGTDSVGWAVTDLDYNIQKFNGKAMWGIRLFEAGKTAAERRVFRTTRRRIQRRKHRIELLQELFDSEISKADTNFYLRLKESKYWVEDRTLGQTNILFNDPEYTDKDYYKQYPTIYHLRKELMTSDEPHDVRLVYLAIHHLIKNRGHFLFEGEGRKDVSSFKVIFRELCQSMHDEMEIVLEAADLDEVEAVLKNREYGITDKKTRLNKLLTIDDEHKKEQKSIIALLAGGKTKVDALFGEKTSEDSDVKDITFAGDKFEESFDALSIMLGDKMFCLEKMKAIYDWSILEEILQGEDYLSYAKVATYEKHKNDLATLKKIMKKYRSDEYDACFKDPGKKDNYCAYVGMAKKGKKKLVLEKKCSQEDLCKYLGKVFKDVKQNDPDLQYLMAEIQRGTLLPKQVNKDNGVIPHQLHLEELRMILANVKKYLEFLNDKDDSGFTVSEKIEKIFAFRIPYYVGPLNAHHKSLGHCWIVRNKGMENQKVLPWNFDEIVNLEASATAFIRKMTSKCTYVIGADVVPKNSLVYSEFMVLNELNNVKVNGELLPVELKEKVFEEVFKRVKRVTGKRLRDFLIAEGAFKKGDELSGFDQNFKGSLTAYLDFKRILGEKKIPKEAIEEMIQAIVLFGDDRKLLKRRVEKRYGELLSKEEIAAICKLKYTGWGRLSREFLEEIYVVNHKTGEMINIISMMHGTNANLMQLLSSEYRFTEALEAYNEERQTDHSDIAYGIVKDLYVSPAVRRSIWQSLKIVKEIAKIKKAAPKKVFVEVARENAEKKRTVSRKNALIALYKNCKEEERDWIAELDAKTDHELRRDRLYLYYTQMGRCMYTGKPIDLNRLFDTNVYDVDHIFPQSKIKDDSLSNRVLVERKVNAKKSDVYPLPEEIRNKNRGFWTMLHRKELISKRKYDRLTRVTPFSDSELADFIARQLVETRQSTKAVAQVLKKVFPDTDVVYVKAGNVSRFRYDFKMIKVREVNDYHHAKDAYLNIVVGNVYDTKFTKSPLNFIQGKDGKNYSLNQMFNYDVERSGVIAWKAGEKGTITTVKRMMKKNNIQFTRHAFEVKGGLFDQTIMKKGKGQVPIKSSDVHLSDISKYGGYNKAAGAYFFLVEHTVKKKRIRTLEFAPVYLAKKLENRSALLEYCKNELNLLESRILLPKVKINTMFEIDGFKMHISGRTGKVVIFKGAEQLCISEQYGLDIKKINKYIQRCKLARENLPVTAFDGISTHNNDVLYSVMMQKLKDTVYGIHLSSQLKNLEKGKEVFGKLSLKEQCEVLMEALNLFSCNSLSANFKLINSGASCGTLKLSNNFSNRKSFILYNQSITGLFEQKVDLLRLAATKKAGQAKKKKDYKDDDDK

SEQ ID NO: 720 - protein, 1376 aa, synthetic construct
MAPKKKRKVMSIAEKNNSEYYLGLDIGTDSVGWAVTDLDYNIQKFNGKAMWGIRLFEAGKTAAERRVFRTTRRRIQRRKHRIELLQELFDSEISKADTNFYLRLKESKYWVEDRTLGQTNILFNDPEYTDKDYYKQYPTIYHLRKELMTSDEPHDVRLVYLAIHHLIKNRGHFLFEGEGRKDVSSFKVIFRELCQSMHDEMEIVLEAADLDEVEAVLKNREYGITDKKTRLNKLLTIDDEHKKEQKSIIALLAGGKTKVDALFGEKTSEDSDVKDITFAGDKFEESFDALSIMLGDKMFCLEKMKAIYDWSILEEILQGEDYLSYAKVATYEKHKNDLATLKKIMKKYRSDEYDACFKDPGKKDNYCAYVGMAKKGKKKLVLEKKCSQEDLCKYLGKVFKDVKQNDPDLQYLMAEIQRGTLLPKQVNKDNGVIPHQLHLEELRMILANVKKYLEFLNDKDDSGFTVSEKIEKIFAFRIPYYVGPLNAHHKSLGHCWIVRNKGMENQKVLPWNFDEIVNLEASATAFIRKMTSKCTYVIGADVVPKNSLVYSEFMVLNELNNVKVNGELLPVELKEKVFEEVFKRVKRVTGKRLRDFLIAEGAFKKGDELSGFDQNFKGSLTAYLDFKRILGEKKIPKEAIEEMIQAIVLFGDDRKLLKRRVEKRYGELLSKEEIAAICKLKYTGWGRLSREFLEEIYVVNHKTGEMINIISMMHGTNANLMQLLSSEYRFTEALEAYNEERQTDHSDIAYGIVKDLYVSPAVRRSIWQSLKIVKEIAKIKKAAPKKVFVEVARENAEKKRTVSRKNALIALYKNCKEEERDWIAELDAKTDHELRRDRLYLYYTQMGRCMYTGKPIDLNRLFDTNVYDVDHIFPQSKIKDDSLSNRVLVERKVNAKKSDVYPLPEEIRNKNRGFWTMLHRKELISKRKYDRLTRVTPFSDSELADFIARQLVETRQSTKAVAQVLKKVFPDTDVVYVKAGNVSRFRYDFKMIKVREVNDYHHAKDAYLNIVVGNVYDTKFTKSPLNFIQGKDGKNYSLNQMFNYDVERSGVIAWKAGEKGTITTVKRMMKKNNIQFTRHAFEVKGGLFDQTIMKKGKGQVPIKSSDVHLSDISKYGGYNKAAGAYFFLVEHTVKKKRIRTLEFAPVYLAKKLENRSALLEYCKNELNLLESRILLPKVKINTMFEIDGFKMHISGRTGKQVIFKGAEQLCISEQYGLDIKKINKYIQRCKLARENLPVTAFDGISTHNNDVLYSVMMQKLKDTVYGIHLSSQLKNLEKGKEVFGKLSLKEQCEVLMEALNLFSCNSRSANFKLINSGASCGTLKLSNNFSNRKSFILYNQSITGLFEQKVDLLRLAATKKAGQAKKKKDYKDDDDK

SEQ ID NO: 721 - protein, 1376 aa, synthetic construct
MAPKKKRKVMSIAEKNNSEYYLGLDIGTDSVGWAVTDLDYNIQKFNGKAMWGIRLFEAGKTAAERRVFRTTRRRIQRRKHRIELLQELFDSEISKADTNFYLRLKESKYWVEDRTLGQTNILFNDPEYTDKDYYKQYPTIYHLRKELMTSDEPHDVRLVYLAIHHLIKNRGHFLFEGEGRKDVSSFKVIFRELCQSMHDEMEIVLEAADLDEVEAVLKNREYGITDKKTRLNKLLTIDDEHKKEQKSIIALLAGGKTKVDALFGEKTSEDSDVKDITFAGDKFEESFDALSIMLGDKMFCLEKMKAIYDWSILEEILQGEDYLSYAKVATYEKHKNDLATLKKIMKKYRSDEYDACFKDPGKKDNYCAYVGMAKKGKKKLVLEKKCSQEDLCKYLGKVFKDVKQNDPDLQYLMAEIQRGTLLPKQVNKDNGVIPHQLHLEELRMILANVKKYLEFLNDKDDSGFTVSEKIEKIFAFRIPYYVGPLNAHHKSLGHCWIVRNKGMENQKVLPWNFDEIVNLEASATAFIRKMTSKCTYVIGADVVPKNSLVYSEFMVLNELNNVKVNGELLPVELKEKVFEEVFKRVKRVTGKRLRDFLIAEGAFKKGDELSGFDQNFKGSLTAYLDFKRILGEKKIPKEAIEEMIQAIVLFGDDRKLLKRRVEKRYGELLSKEEIAAICKLKYTGWGRLSREFLEEIYVVNHKTGEMINIISMMHGTNANLMQLLSSEYRFTEALEAYNEERQTDHSDIAYGIVKDLYVSPAVRRSIWQSLKIVKEIAKIKKAAPKKVFVEVARENAEKKRTVSRKNALIALYKNCKEEERDWIAELDAKTDHELRRDRLYLYYTQMGRCMYTGKPIDLNRLFDTNVYDVDHIFPQSKIKDDSLSNRVLVERKVNAKKSDVYPLPEEIRNKNRGFWTMLHRKELISKRKYDRLTRVTPFSDSELADFIARQLVETRQSTKAVAQVLKKVFPDTDVVYVKAGNVSRFRYDFKMIKVREVNDYHHAKDAYLNIVVGNVYDTKFTKSPLNFIQGKDGKNYSLNQMFNYDVERSGVIAWKAGEKGTITTVKRMMKKNNIQFTRHAFEVKGGLFDQTIMKKGKGQVPIKSSDVHLSDISKYGGYNKARGAYFFLVEHTVKKKRIRTLEFAPVYLAKKLENRSALLEYCKNELNLLESRILLPKVKINTMFEIDGFKMHISGRTGKQVIFKGAEQLCISEQYGLDIKKINKYIQRCKLARENLPVTAFDGISTHNNDVLYSVMMQKLKDTVYGIHLSSQLKNLEKGKEVFGKLSLKEQCEVLMEALNLFSCNSLSANFKLINSGASCGTLQLSNNFSNRKSFILYNQSITGLFEQKVDLLRLAATKKAGQAKKKKDYKDDDDK

SEQ ID NO: 722 - protein, 1376 aa, synthetic construct
MAPKKKRKVMSIAEKNNSEYYLGLDIGTDSVGWAVTDLDYNIQKFNGKAMWGIRLFEAGKTAAERRVFRTTRRRIQRRKHRIELLQELFDSEISKADTNFYLRLKESKYWVEDRTLGQTNILFNDPEYTDKDYYKQYPTIYHLRKELMTSDEPHDVRLVYLAIHHLIKNRGHFLFEGEGRKDVSSFKVIFRELCQSMHDEMEIVLEAADLDEVEAVLKNREYGITDKKTRLNKLLTIDDEHKKEQKSIIALLAGGKTKVDALFGEKTSEDSDVKDITFAGDKFEESFDALSIMLGDKMFCLEKMKAIYDWSILEEILQGEDYLSYAKVATYEKHKNDLATLKKIMKKYRSDEYDACFKDPGKKDNYCAYVGMAKKGKKKLVLEKKCSQEDLCKYLGKVFKDVKQNDPDLQYLMAEIQRGTLLPKQVNKDNGVIPHQLHLEELRMILANVKKYLEFLNDKDDSGFTVSEKIEKIFAFRIPYYVGPLNAHHKSLGHCWIVRNKGMENQKVLPWNFDEIVNLEASATAFIRKMTSKCTYVIGADVVPKNSLVYSEFMVLNELNNVKVNGELLPVELKEKVFEEVFKRVKRVTGKRLRDFLIAEGAFKKGDELSGFDQNFKGSLTAYLDFKRILGEKKIPKEAIEEMIQAIVLFGDDRKLLKRRVEKRYGELLSKEEIAAICKLKYTGWGRLSREFLEEIYVVNHKTGEMINIISMMHGTNANLMQLLSSEYRFTEALEAYNEERQTDHSDIAYGIVKDLYVSPAVRRSIWQSLKIVKEIAKIKKAAPKKVFVEVARENAEKKRTVSRKNALIALYKNCKEEERDWIAELDAKTDHELRRDRLYLYYTQMGRCMYTGKPIDLNRLFDTNVYDVDHIFPQSKIKDDSLSNRVLVERKVNAKKSDVYPLPEEIRNKNRGFWTMLHRKELISKRKYDRLTRVTPFSDSELADFIARQLVETRQSTKAVAQVLKKVFPDTDVVYVKAGNVSRFRYDFKMIKVREVNDYHHAKDAYLNIVVGNVYDTKFTKSPLNFIQGKDGKNYSLNQMFNYDVERSGVIAWKAGEKGTITTVKRMMKKNNIQFTRHAFEVKGGLFDQTIMKKGKGQVPIKSSDVHLSDISKYGGYNKAAGAYFFLVEHTVKKKRIRTLEFAPVYLAKKLENRSALLEYCKNELNLLESRILLPKVKINTMFEIDGFKMHISGRTGKQVIFKGAEQLCISEQYGLDIKKINKYIQRCKLARENLPVTAFDGISTHNNDVLYSVMMQKLKDTVYGIHLSSQLKNLEKGKEVFGKLSLKEQCEVLMEALNLFSCNSRSANFKLINSGASCGTLQLSNNFSNRKSFILYNQSITGLFEQKVDLLRLAATKKAGQAKKKKDYKDDDDK

SEQ ID NO: 723 - protein, 1376 aa, synthetic construct
MAPKKKRKVMSIAEKNNSEYYLGLDIGTDSVGWAVTDLDYNIQKFNGKAMWGIRLFEAGKTAAERRVFRTTRRRIQRRKHRIELLQELFDSEISKADTNFYLRLKESKYWVEDRTLGQTNILFNDPEYTDKDYYKQYPTIYHLRKELMTSDEPHDVRLVYLAIHHLIKNRGHFLFEGEGRKDVSSFKVIFRELCQSMHDEMEIVLEAADLDEVEAVLKNREYGITDKKTRLNKLLTIDDEHKKEQKSIIALLAGGKTKVDALFGEKTSEDSDVKDITFAGDKFEESFDALSIMLGDKMFCLEKMKAIYDWSILEEILQGEDYLSYAKVATYEKHKNDLATLKKIMKKYRSDEYDACFKDPGKKDNYCAYVGMAKKGKKKLVLEKKCSQEDLCKYLGKVFKDVKQNDPDLQYLMAEIQRGTLLPKQVNKDNGVIPHQLHLEELRMILANVKKYLEFLNDKDDSGFTVSEKIEKIFAFRIPYYVGPLNAHHKSLGHCWIVRNKGMENQKVLPWNFDEIVNLEASATAFIRKMTSKCTYVIGADVVPKNSLVYSEFMVLNELNNVKVNGELLPVELKEKVFEEVFKRVKRVTGKRLRDFLIAEGAFKKGDELSGFDQNFKGSLTAYLDFKRILGEKKIPKEAIEEMIQAIVLFGDDRKLLKRRVEKRYGELLSKEEIAAICKLKYTGWGRLSREFLEEIYVVNHKTGEMINIISMMHGTNANLMQLLSSEYRFTEALEAYNEERQTDHSDIAYGIVKDLYVSPAVRRSIWQSLKIVKEIAKIKKAAPKKVFVEVARENAEKKRTVSRKNALIALYKNCKEEERDWIAELDAKTDHELRRDRLYLYYTQMGRCMYTGKPIDLNRLFDTNVYDVDHIFPQSKIKDDSLSNRVLVERKVNAKKSDVYPLPEEIRNKNRGFWTMLHRKELISKRKYDRLTRVTPFSDSELADFIARQLVETRQSTKAVAQVLKKVFPDTDVVYVKAGNVSRFRYDFKMIKVREVNDYHHAKDAYLNIVVGNVYDTKFTKSPLNFIQGKDGKNYSLNQMFNYDVERSGVIAWKAGEKGTITTVKRMMKKNNIQFTRHAFEVKGGLFDQTIMKKGKGQVPIKSSDVHLSDISKYGGYNKARGAYFFLVEHTVKKKRIRTLEFAPVYLAKKLENRSALLEYCKNELNLLESRILLPKVKINTMFEIDGFKMHISGRTGKQVIFKGAEQLCISEQYGLDIKKINKYIQRCKLARENLPVTAFDGISTHNNDVLYSVMMQKLKDTVYGIHLSSQLKNLEKGKEVFGKLSLKEQCEVLMEALNLFSCNSLSANFKLINSGASCGTLTLSNNFSNRKSFILYNQSITGLFEQKVDLLRLAATKKAGQAKKKKDYKDDDDK

SEQ ID NO: 724 - protein, 1376 aa, synthetic construct
MAPKKKRKVMSIAEKNNSEYYLGLDIGTDSVGWAVTDLDYNIQKFNGKAMWGIRLFEAGKTAAERRVFRTTRRRIQRRKHRIELLQELFDSEISKADTNFYLRLKESKYWVEDRTLGQTNILFNDPEYTDKDYYKQYPTIYHLRKELMTSDEPHDVRLVYLAIHHLIKNRGHFLFEGEGRKDVSSFKVIFRELCQSMHDEMEIVLEAADLDEVEAVLKNREYGITDKKTRLNKLLTIDDEHKKEQKSIIALLAGGKTKVDALFGEKTSEDSDVKDITFAGDKFEESFDALSIMLGDKMFCLEKMKAIYDWSILEEILQGEDYLSYAKVATYEKHKNDLATLKKIMKKYRSDEYDACFKDPGKKDNYCAYVGMAKKGKKKLVLEKKCSQEDLCKYLGKVFKDVKQNDPDLQYLMAEIQRGTLLPKQVNKDNGVIPHQLHLEELRMILANVKKYLEFLNDKDDSGFTVSEKIEKIFAFRIPYYVGPLNAHHKSLGHCWIVRNKGMENQKVLPWNFDEIVNLEASATAFIRKMTSKCTYVIGADVVPKNSLVYSEFMVLNELNNVKVNGELLPVELKEKVFEEVFKRVKRVTGKRLRDFLIAEGAFKKGDELSGFDQNFKGSLTAYLDFKRILGEKKIPKEAIEEMIQAIVLFGDDRKLLKRRVEKRYGELLSKEEIAAICKLKYTGWGRLSREFLEEIYVVNHKTGEMINIISMMHGTNANLMQLLSSEYRFTEALEAYNEERQTDHSDIAYGIVKDLYVSPAVRRSIWQSLKIVKEIAKIKKAAPKKVFVEVARENAEKKRTVSRKNALIALYKNCKEEERDWIAELDAKTDHELRRDRLYLYYTQMGRCMYTGKPIDLNRLFDTNVYDVDHIFPQSKIKDDSLSNRVLVERKVNAKKSDVYPLPEEIRNKNRGFWTMLHRKELISKRKYDRLTRVTPFSDSELADFIARQLVETRQSTKAVAQVLKKVFPDTDVVYVKAGNVSRFRYDFKMIKVREVNDYHHAKDAYLNIVVGNVYDTKFTKSPLNFIQGKDGKNYSLNQMFNYDVERSGVIAWKAGEKGTITTVKRMMKKNNIQFTRHAFEVKGGLFDQTIMKKGKGQVPIKSSDVHLSDISKYGGYNKARGAYFFLVEHTVKKKRIRTLEFAPVYLAKKLENRSALLEYCKNELNLLESRILLPKVKINTMFEIDGFKMHISGRTGKQVIFKGAEQLCISEQYGLDIKKINKYIQRCKLARENLPVTAFDGISTHNNDVLYSVMMQKLKDTVYGIHLSSQLKNLEKGKEVFGKLSLKEQCEVLMEALNLFSCNSRSANFKLINSGASCGTLQLSNNFSNRKSFILYNQSITGLFEQKVDLLRLAATKKAGQAKKKKDYKDDDDK

SEQ ID NO: 725 - protein, 1376 aa, synthetic construct
MAPKKKRKVMSIAEKNNSEYYLGLDIGTDSVGWAVTDLDYNIQKFNGKAMWGIRLFEAGKTAAERRVFRTTRRRIQRRKHRIELLQELFDSEISKADTNFYLRLKESKYWVEDRTLGQTNILFNDPEYTDKDYYKQYPTIYHLRKELMTSDEPHDVRLVYLAIHHLIKNRGHFLFEGEGRKDVSSFKVIFRELCQSMHDEMEIVLEAADLDEVEAVLKNREYGITDKKTRLNKLLTIDDEHKKEQKSIIALLAGGKTKVDALFGEKTSEDSDVKDITFAGDKFEESFDALSIMLGDKMFCLEKMKAIYDWSILEEILQGEDYLSYAKVATYEKHKNDLATLKKIMKKYRSDEYDACFKDPGKKDNYCAYVGMAKKGKKKLVLEKKCSQEDLCKYLGKVFKDVKQNDPDLQYLMAEIQRGTLLPKQVNKDNGVIPHQLHLEELRMILANVKKYLEFLNDKDDSGFTVSEKIEKIFAFRIPYYVGPLNAHHKSLGHCWIVRNKGMENQKVLPWNFDEIVNLEASATAFIRKMTSKCTYVIGADVVPKNSLVYSEFMVLNELNNVKVNGELLPVELKEKVFEEVFKRVKRVTGKRLRDFLIAEGAFKKGDELSGFDQNFKGSLTAYLDFKRILGEKKIPKEAIEEMIQAIVLFGDDRKLLKRRVEKRYGELLSKEEIAAICKLKYTGWGRLSREFLEEIYVVNHKTGEMINIISMMHGTNANLMQLLSSEYRFTEALEAYNEERQTDHSDIAYGIVKDLYVSPAVRRSIWQSLKIVKEIAKIKKAAPKKVFVEVARENAEKKRTVSRKNALIALYKNCKEEERDWIAELDAKTDHELRRDRLYLYYTQMGRCMYTGKPIDLNRLFDTNVYDVDHIFPQSKIKDDSLSNRVLVERKVNAKKSDVYPLPEEIRNKNRGFWTMLHRKELISKRKYDRLTRVTPFSDSELADFIARQLVETRQSTKAVAQVLKKVFPDTDVVYVKAGNVSRFRYDFKMIKVREVNDYHHAKDAYLNIVVGNVYDTKFTKSPLNFIQGKDGKNYSLNQMFNYDVERSGVIAWKAGEKGTITTVKRMMKKNNIQFTRHAFEVKGGLFDQTIMKKGKGQVPIKSSDVHLSDISKYGGYNKARGAYFFLVEHTVKKKRIRTLEFAPVYLAKKLENRSALLEYCKNELNLLESRILLPKVKINTMFEIDGFKMHISGRTGKQVIFKGAEQLCISEQYGLDIKKINKYIQRCKLARENLPVTAFDGISTHNNDVLYSVMMQKLKDTVYGIHLSSQLKNLEKGKEVFGKLSLKEQCEVLMEALNLFSCNSRSANFKLINSGASCGTLTLSNNFSNRKSFILYNQSITGLFEQKVDLLRLAATKKAGQAKKKKDYKDDDDK

SEQ ID NO: 726-730 - skipped (5 entries)

SEQ ID NO: 731 - DNA, 4140 bp, synthetic construct
  source 1..4140: mol_type = other DNA
atggccccaaagaagaagcggaaagtcatgtccatcgccgagaagaacaacagcgagtactacctcggcctggacatcggcaccgacagcgtgggctgggccgtgaccgacctggactacaacatccagaagttcaacggcaaggccatgtggggcatccgcctgttcgaggccggcaagacggccgccgagcggcgggtgttccgcaccacccggcgccgcatccagcggcgcaagcaccgcatcgagctgctgcaggagctgttcgacagcgagatctccaaggccgacaccaacttctacctgcggctgaaggagagcaagtactgggtggaggaccgcacgctggggcagaccaacatcctgttcaacgaccccgagtacaccgacaaggactactacaagcagtaccccaccatctaccacctgcggaaggagctgatgaccagcgacgagccgcacgacgtgcggctcgtctacctggccatccaccacctgatcaagaaccggggccacttcctgttcgagggggagggccggaaggacgtcagctccttcaaggtgatcttccgggagctgtgccagtccatgcacgacgagatggagatcgtgctggaggccgccgacctggacgaggtggaggcggtgctgaagaaccgggagtacgggatcaccgacaagaaaacccggctgaacaagctcctgaccatcgacgacgagcacaagaaggagcagaagtccatcatcgccctgctggccgggggcaagaccaaggtggacgccctgttcggggagaaaacctccgaggacagcgacgtgaaggacatcaccttcgccggggacaagttcgaggagagcttcgacgccctgagcatcatgctcggggacaagatgttctgcctcgagaagatgaaggccatctacgactggtccatcctggaggagatcctccagggcgaggactacctgtcctacgccaaggtggccacctacgagaagcacaagaacgacctggccaccctgaagaagatcatgaagaagtaccggtccgacgagtacgacgcctgcttcaaggaccccggcaagaaggacaactactgcgcctacgtggggatggccaagaagggcaagaagaagctggtgctggagaagaagtgctcccaggaggacctgtgcaagtacctgggcaaggtgttcaaggacgtgaagcagaacgaccccgacctgcagtacctgatggccgagatccagcggggcaccctgctgcccaagcaggtgaacaaggacaacggggtcatcccccaccagctccacctggaggagctgcggatgatcctggccaacgtgaagaagtacctggagttcctgaacgacaaggacgactccgggttcaccgtgagcgagaagatcgagaagatcttcgccttccggatcccctactacgtggggcccctgaacgcccaccacaagtccctgggccactgctggatcgtgcggaacaagggcatggagaaccagaaggtgctgccctggaacttcgacgagatcgtgaacctggaggccagcgccaccgccttcatccgcaagatgaccagcaagtgcacctacgtgatcggcgccgacgtggtgcccaagaactccctggtgtacagcgagtttatggtgctgaacgagctgaacaacgtgaaggtgaacggggagctgctgcccgtcgagctgaaggagaaggtgttcgaggaggtgttcaagcgggtgaagcgggtgaccgggaagcggctgcgcgacttcctgatcgccgagggggccttcaagaagggcgacgagctgtccgggttcgaccagaacttcaagggctccctcaccgcctacctggacttcaagcgcatcctgggggagaagaagatccccaaggaggccatcgaggagatgatccaggccatcgtgctgttcggcgacgaccgcaagctgctgaagcggcgggtggagaagcggtacggcgagctgctctccaaggaggagatcgccgccatctgcaagctgaagtacaccggctggggccggctgagccgggagttcctggaggagatctacgtggtgaaccacaagaccggggagatgatcaacatcatctccatgatgcacgggaccaacgccaacctgatgcagctgctgagcagcgagtaccggttcaccgaggccctggaggcctacaacgaggagcggcagaccgaccactccgacatcgcctacgggatcgtgaaggacctgtacgtgagccccgccgtgcggcggtccatctggcagtccctgaagatcgtgaaggagatcgccaagatcaagaaggccgcccccaagaaggtgttcgtggaggtggcccgggagaacgccgagaagaagcggaccgtgtcccggaagaacgcgctgatcgccctgtacaagaactgcaaggaggaggagcgcgactggatcgccgagctcgacgccaagaccgaccacgagctgcggcgggaccggctgtacctgtactacacccagatgggccggtgcatgtacaccggcaagcccatcgacctgaaccggctgttcgacaccaacgtgtacgacgtggaccacatcttcccccagtccaagatcaaggacgacagcctgtccaaccgggtgctggtggagcggaaggtgaacgccaagaagtccgacgtgtaccccctgcccgaggagatccggaacaagaaccggggcttctggacaatgctgcaccgcaaggagctgatctccaagcggaagtacgaccggctcacccgggtgacccccttcagcgactccgagctggccgacttcatcgcccgccagctggtggagacacgccagagcaccaaggccgtggcccaggtgctgaagaaggtgttccccgacaccgacgtggtgtacgtgaaggccgggaacgtgtcccggttcaggtacgacttcaagatgatcaaggtgcgggaggtgaacgactaccaccacgccaaggacgcctacctgaacatcgtggtgggcaacgtgtacgacaccaagttcaccaagagccccctgaacttcatccaggggaaggacgggaagaactactccctgaaccagatgttcaactacgacgtggagcggtccggcgtgatcgcctggaaggccggcgagaagggcaccatcaccaccgtgaagcggatgatgaagaagaacaacatccagttcacccgccacgccttcgaggtgaagggcgggctgttcgaccagaccatcatgaagaagggcaagggccaggtgcccatcaagagctccgacgtgcacctgagcgacatcagcaagtacggcggctacaacaaggccgccggcgcctacttcttcctggtggagcacaccgtgaagaagaagcgcatccgcaccctggagttcgccccggtgtacctggccaagaagctggagaaccggtccgccctgctggagtactgcaagaacgagctgaacctgctggagagcaggatcctgctgcccaaggtgaagatcaacacgatgttcgagatcgacggcttcaagatgcacatctccggccggaccggcaagcaggtcatcttcaagggcgccgagcagctgtgcatctccgagcagtacggcctggacatcaagaagatcaacaagtacatccagcggtgcaagctggcccgggagaacctgcccgtgaccgccttcgacggcatcagcacccacaacaacgacgtgctgtacagcgtgatgatgcagaagctgaaggacaccgtgtacggcatccacctgtccagccagctgaagaacctggagaagggcaaggaggtgttcgggaagctgtccctgaaggagcagtgcgaggtgctgatggaggccctgaacctgttcagctgcaacagcctgagcgccaacttcaagctgatcaacagcggggcctcctgcggcaccctgcagctgtccaacaacttcagcaaccgcaagtccttcatcctgtacaaccagtccatcaccgggctgttcgagcagaaggtggacctgctgcggctgaagcggcccgccgccaccaagaaggccggccaggccaagaagaagaaggactacaaggacgacgacgacaagtaa

SEQ ID NO: 732 - DNA, 4140 bp, synthetic construct
  source 1..4140: mol_type = other DNA
atggccccaaagaagaagcggaaagtcatgtccatcgccgagaagaacaacagcgagtactacctcggcctggacatcggcaccgacagcgtgggctgggccgtgaccgacctggactacaacatccagaagttcaacggcaaggccatgtggggcatccgcctgttcgaggccggcaagacggccgccgagcggcgggtgttccgcaccacccggcgccgcatccagcggcgcaagcaccgcatcgagctgctgcaggagctgttcgacagcgagatctccaaggccgacaccaacttctacctgcggctgaaggagagcaagtactgggtggaggaccgcacgctggggcagaccaacatcctgttcaacgaccccgagtacaccgacaaggactactacaagcagtaccccaccatctaccacctgcggaaggagctgatgaccagcgacgagccgcacgacgtgcggctcgtctacctggccatccaccacctgatcaagaaccggggccacttcctgttcgagggggagggccggaaggacgtcagctccttcaaggtgatcttccgggagctgtgccagtccatgcacgacgagatggagatcgtgctggaggccgccgacctggacgaggtggaggcggtgctgaagaaccgggagtacgggatcaccgacaagaaaacccggctgaacaagctcctgaccatcgacgacgagcacaagaaggagcagaagtccatcatcgccctgctggccgggggcaagaccaaggtggacgccctgttcggggagaaaacctccgaggacagcgacgtgaaggacatcaccttcgccggggacaagttcgaggagagcttcgacgccctgagcatcatgctcggggacaagatgttctgcctcgagaagatgaaggccatctacgactggtccatcctggaggagatcctccagggcgaggactacctgtcctacgccaaggtggccacctacgagaagcacaagaacgacctggccaccctgaagaagatcatgaagaagtaccggtccgacgagtacgacgcctgcttcaaggaccccggcaagaaggacaactactgcgcctacgtggggatggccaagaagggcaagaagaagctggtgctggagaagaagtgctcccaggaggacctgtgcaagtacctgggcaaggtgttcaaggacgtgaagcagaacgaccccgacctgcagtacctgatggccgagatccagcggggcaccctgctgcccaagcaggtgaacaaggacaacggggtcatcccccaccagctccacctggaggagctgcggatgatcctggccaacgtgaagaagtacctggagttcctgaacgacaaggacgactccgggttcaccgtgagcgagaagatcgagaagatcttcgccttccggatcccctactacgtggggcccctgaacgcccaccacaagtccctgggccactgctggatcgtgcggaacaagggcatggagaaccagaaggtgctgccctggaacttcgacgagatcgtgaacctggaggccagcgccaccgccttcatccgcaagatgaccagcaagtgcacctacgtgatcggcgccgacgtggtgcccaagaactccctggtgtacagcgagtttatggtgctgaacgagctgaacaacgtgaaggtgaacggggagctgctgcccgtcgagctgaaggagaaggtgttcgaggaggtgttcaagcgggtgaagcgggtgaccgggaagcggctgcgcgacttcctgatcgccgagggggccttcaagaagggcgacgagctgtccgggttcgaccagaacttcaagggctccctcaccgcctacctggacttcaagcgcatcctgggggagaagaagatccccaaggaggccatcgaggagatgatccaggccatcgtgctgttcggcgacgaccgcaagctgctgaagcggcgggtggagaagcggtacggcgagctgctctccaaggaggagatcgccgccatctgcaagctgaagtacaccggctggggccggctgagccgggagttcctggaggagatctacgtggtgaaccacaagaccggggagatgatcaacatcatctccatgatgcacgggaccaacgccaacctgatgcagctgctgagcagcgagtaccggttcaccgaggccctggaggcctacaacgaggagcggcagaccgaccactccgacatcgcctacgggatcgtgaaggacctgtacgtgagccccgccgtgcggcggtccatctggcagtccctgaagatcgtgaaggagatcgccaagatcaagaaggccgcccccaagaaggtgttcgtggaggtggcccgggagaacgccgagaagaagcggaccgtgtcccggaagaacgcgctgatcgccctgtacaagaactgcaaggaggaggagcgcgactggatcgccgagctcgacgccaagaccgaccacgagctgcggcgggaccggctgtacctgtactacacccagatgggccggtgcatgtacaccggcaagcccatcgacctgaaccggctgttcgacaccaacgtgtacgacgtggaccacatcttcccccagtccaagatcaaggacgacagcctgtccaaccgggtgctggtggagcggaaggtgaacgccaagaagtccgacgtgtaccccctgcccgaggagatccggaacaagaaccggggcttctggacaatgctgcaccgcaaggagctgatctccaagcggaagtacgaccggctcacccgggtgacccccttcagcgactccgagctggccgacttcatcgcccgccagctggtggagacacgccagagcaccaaggccgtggcccaggtgctgaagaaggtgttccccgacaccgacgtggtgtacgtgaaggccgggaacgtgtcccggttcaggtacgacttcaagatgatcaaggtgcgggaggtgaacgactaccaccacgccaaggacgcctacctgaacatcgtggtgggcaacgtgtacgacaccaagttcaccaagagccccctgaacttcatccaggggaaggacgggaagaactactccctgaaccagatgttcaactacgacgtggagcggtccggcgtgatcgcctggaaggccggcgagaagggcaccatcaccaccgtgaagcggatgatgaagaagaacaacatccagttcacccgccacgccttcgaggtgaagggcgggctgttcgaccagaccatcatgaagaagggcaagggccaggtgcccatcaagagctccgacgtgcacctgagcgacatcagcaagtacggcggctacaacaaggccgccggcgcctacttcttcctggtggagcacaccgtgaagaagaagcgcatccgcaccctggagttcgccccggtgtacctggccaagaagctggagaaccggtccgccctgctggagtactgcaagaacgagctgaacctgctggagagcaggatcctgctgcccaaggtgaagatcaacacgatgttcgagatcgacggcttcaagatgcacatctccggccggaccggcaagcaggtcatcttcaagggcgccgagcagctgtgcatctccgagcagtacggcctggacatcaagaagatcaacaagtacatccagcggtgcaagctggcccgggagaacctgcccgtgaccgccttcgacggcatcagcacccacaacaacgacgtgctgtacagcgtgatgatgcagaagctgaaggacaccgtgtacggcatccacctgtccagccagctgaagaacctggagaagggcaaggaggtgttcgggaagctgtccctgaaggagcagtgcgaggtgctgatggaggccctgaacctgttcagctgcaacagcctgagcgccaacttcaagctgatcaacagcggggcctcctgcggcaccctgaacctgtccaacaacttcagcaaccgcaagtccttcatcctgtacaaccagtccatcaccgggctgttcgagcagaaggtggacctgctgcggctgaagcggcccgccgccaccaagaaggccggccaggccaagaagaagaaggactacaaggacgacgacgacaagtaa

SEQ ID NO: 733 - DNA, 4140 bp, synthetic construct
  source 1..4140: mol_type = other DNA
atggccccaaagaagaagcggaaagtcatgtccatcgccgagaagaacaacagcgagtactacctcggcctggacatcggcaccgacagcgtgggctgggccgtgaccgacctggactacaacatccagaagttcaacggcaaggccatgtggggcatccgcctgttcgaggccggcaagacggccgccgagcggcgggtgttccgcaccacccggcgccgcatccagcggcgcaagcaccgcatcgagctgctgcaggagctgttcgacagcgagatctccaaggccgacaccaacttctacctgcggctgaaggagagcaagtactgggtggaggaccgcacgctggggcagaccaacatcctgttcaacgaccccgagtacaccgacaaggactactacaagcagtaccccaccatctaccacctgcggaaggagctgatgaccagcgacgagccgcacgacgtgcggctcgtctacctggccatccaccacctgatcaagaaccggggccacttcctgttcgagggggagggccggaaggacgtcagctccttcaaggtgatcttccgggagctgtgccagtccatgcacgacgagatggagatcgtgctggaggccgccgacctggacgaggtggaggcggtgctgaagaaccgggagtacgggatcaccgacaagaaaacccggctgaacaagctcctgaccatcgacgacgagcacaagaaggagcagaagtccatcatcgccctgctggccgggggcaagaccaaggtggacgccctgttcggggagaaaacctccgaggacagcgacgtgaaggacatcaccttcgccggggacaagttcgaggagagcttcgacgccctgagcatcatgctcggggacaagatgttctgcctcgagaagatgaaggccatctacgactggtccatcctggaggagatcctccagggcgaggactacctgtcctacgccaaggtggccacctacgagaagcacaagaacgacctggccaccctgaagaagatcatgaagaagtaccggtccgacgagtacgacgcctgcttcaaggaccccggcaagaaggacaactactgcgcctacgtggggatggccaagaagggcaagaagaagctggtgctggagaagaagtgctcccaggaggacctgtgcaagtacctgggcaaggtgttcaaggacgtgaagcagaacgaccccgacctgcagtacctgatggccgagatccagcggggcaccctgctgcccaagcaggtgaacaaggacaacggggtcatcccccaccagctccacctggaggagctgcggatgatcctggccaacgtgaagaagtacctggagttcctgaacgacaaggacgactccgggttcaccgtgagcgagaagatcgagaagatcttcgccttccggatcccctactacgtggggcccctgaacgcccaccacaagtccctgggccactgctggatcgtgcggaacaagggcatggagaaccagaaggtgctgccctggaacttcgacgagatcgtgaacctggaggccagcgccaccgccttcatccgcaagatgaccagcaagtgcacctacgtgatcggcgccgacgtggtgcccaagaactccctggtgtacagcgagtttatggtgctgaacgagctgaacaacgtgaaggtgaacggggagctgctgcccgtcgagctgaaggagaaggtgttcgaggaggtgttcaagcgggtgaagcgggtgaccgggaagcggctgcgcgacttcctgatcgccgagggggccttcaagaagggcgacgagctgtccgggttcgaccagaacttcaagggctccctcaccgcctacctggacttcaagcgcatcctgggggagaagaagatccccaaggaggccatcgaggagatgatccaggccatcgtgctgttcggcgacgaccgcaagctgctgaagcggcgggtggagaagcggtacggcgagctgctctccaaggaggagatcgccgccatctgcaagctgaagtacaccggctggggccggctgagccgggagttcctggaggagatctacgtggtgaaccacaagaccggggagatgatcaacatcatctccatgatgcacgggaccaacgccaacctgatgcagctgctgagcagcgagtaccggttcaccgaggccctggaggcctacaacgaggagcggcagaccgaccactccgacatcgcctacgggatcgtgaaggacctgtacgtgagccccgccgtgcggcggtccatctggcagtccctgaagatcgtgaaggagatcgccaagatcaagaaggccgcccccaagaaggtgttcgtggaggtggcccgggagaacgccgagaagaagcggaccgtgtcccggaagaacgcgctgatcgccctgtacaagaactgcaaggaggaggagcgcgactggatcgccgagctcgacgccaagaccgaccacgagctgcggcgggaccggctgtacctgtactacacccagatgggccggtgcatgtacaccggcaagcccatcgacctgaaccggctgttcgacaccaacgtgtacgacgtggaccacatcttcccccagtccaagatcaaggacgacagcctgtccaaccgggtgctggtggagcggaaggtgaacgccaagaagtccgacgtgtaccccctgcccgaggagatccggaacaagaaccggggcttctggacaatgctgcaccgcaaggagctgatctccaagcggaagtacgaccggctcacccgggtgacccccttcagcgactccgagctggccgacttcatcgcccgccagctggtggagacacgccagagcaccaaggccgtggcccaggtgctgaagaaggtgttccccgacaccgacgtggtgtacgtgaaggccgggaacgtgtcccggttcaggtacgacttcaagatgatcaaggtgcgggaggtgaacgactaccaccacgccaaggacgcctacctgaacatcgtggtgggcaacgtgtacgacaccaagttcaccaagagccccctgaacttcatccaggggaaggacgggaagaactactccctgaaccagatgttcaactacgacgtggagcggtccggcgtgatcgcctggaaggccggcgagaagggcaccatcaccaccgtgaagcggatgatgaagaagaacaacatccagttcacccgccacgccttcgaggtgaagggcgggctgttcgaccagaccatcatgaagaagggcaagggccaggtgcccatcaagagctccgacgtgcacctgagcgacatcagcaagtacggcggctacaacaaggccgccggcgcctacttcttcctggtggagcacaccgtgaagaagaagcgcatccgcaccctggagttcgccccggtgtacctggccaagaagctggagaaccggtccgccctgctggagtactgcaagaacgagctgaacctgctggagagcaggatcctgctgcccaaggtgaagatcaacacgatgttcgagatcgacggcttcaagatgcacatctccggccggaccggcaagcaggtcatcttcaagggcgccgagcagctgtgcatctccgagcagtacggcctggacatcaagaagatcaacaagtacatccagcggtgcaagctggcccgggagaacctgcccgtgaccgccttcgacggcatcagcacccacaacaacgacgtgctgtacagcgtgatgatgcagaagctgaaggacaccgtgtacggcatccacctgtccagccagctgaagaacctggagaagggcaaggaggtgttcgggaagctgtccctgaaggagcagtgcgaggtgctgatggaggccctgaacctgttcagctgcaacagcctgagcgccaacttcaagctgatcaacagcggggcctcctgcggcaccctgactctgtccaacaacttcagcaaccgcaagtccttcatcctgtacaaccagtccatcaccgggctgttcgagcagaaggtggacctgctgcggctgaagcggcccgccgccaccaagaaggccggccaggccaagaagaagaaggactacaaggacgacgacgacaagtaa

SEQ ID NO: 734 - DNA, 4140 bp, synthetic construct
  source 1..4140: mol_type = other DNA
atggccccaaagaagaagcggaaagtcatgtccatcgccgagaagaacaacagcgagtactacctcggcctggacatcggcaccgacagcgtgggctgggccgtgaccgacctggactacaacatccagaagttcaacggcaaggccatgtggggcatccgcctgttcgaggccggcaagacggccgccgagcggcgggtgttccgcaccacccggcgccgcatccagcggcgcaagcaccgcatcgagctgctgcaggagctgttcgacagcgagatctccaaggccgacaccaacttctacctgcggctgaaggagagcaagtactgggtggaggaccgcacgctggggcagaccaacatcctgttcaacgaccccgagtacaccgacaaggactactacaagcagtaccccaccatctaccacctgcggaaggagctgatgaccagcgacgagccgcacgacgtgcggctcgtctacctggccatccaccacctgatcaagaaccggggccacttcctgttcgagggggagggccggaaggacgtcagctccttcaaggtgatcttccgggagctgtgccagtccatgcacgacgagatggagatcgtgctggaggccgccgacctggacgaggtggaggcggtgctgaagaaccgggagtacgggatcaccgacaagaaaacccggctgaacaagctcctgaccatcgacgacgagcacaagaaggagcagaagtccatcatcgccctgctggccgggggcaagaccaaggtggacgccctgttcggggagaaaacctccgaggacagcgacgtgaaggacatcaccttcgccggggacaagttcgaggagagcttcgacgccctgagcatcatgctcggggacaagatgttctgcctcgagaagatgaaggccatctacgactggtccatcctggaggagatcctccagggcgaggactacctgtcctacgccaaggtggccacctacgagaagcacaagaacgacctggccaccctgaagaagatcatgaagaagtaccggtccgacgagtacgacgcctgcttcaaggaccccggcaagaaggacaactactgcgcctacgtggggatggccaagaagggcaagaagaagctggtgctggagaagaagtgctcccaggaggacctgtgcaagtacctgggcaaggtgttcaaggacgtgaagcagaacgaccccgacctgcagtacctgatggccgagatccagcggggcaccctgctgcccaagcaggtgaacaaggacaacggggtcatcccccaccagctccacctggaggagctgcggatgatcctggccaacgtgaagaagtacctggagttcctgaacgacaaggacgactccgggttcaccgtgagcgagaagatcgagaagatcttcgccttccggatcccctactacgtggggcccctgaacgcccaccacaagtccctgggccactgctggatcgtgcggaacaagggcatggagaaccagaaggtgctgccctggaacttcgacgagatcgtgaacctggaggccagcgccaccgccttcatccgcaagatgaccagcaagtgcacctacgtgatcggcgccgacgtggtgcccaagaactccctggtgtacagcgagtttatggtgctgaacgagctgaacaacgtgaaggtgaacggggagctgctgcccgtcgagctgaaggagaaggtgttcgaggaggtgttcaagcgggtgaagcgggtgaccgggaagcggctgcgcgacttcctgatcgccgagggggccttcaagaagggcgacgagctgtccgggttcgaccagaacttcaagggctccctcaccgcctacctggacttcaagcgcatcctgggggagaagaagatccccaaggaggccatcgaggagatgatccaggccatcgtgctgttcggcgacgaccgcaagctgctgaagcggcgggtggagaagcggtacggcgagctgctctccaaggaggagatcgccgccatctgcaagctgaagtacaccggctggggccggctgagccgggagttcctggaggagatctacgtggtgaaccacaagaccggggagatgatcaacatcatctccatgatgcacgggaccaacgccaacctgatgcagctgctgagcagcgagtaccggttcaccgaggccctggaggcctacaacgaggagcggcagaccgaccactccgacatcgcctacgggatcgtgaaggacctgtacgtgagccccgccgtgcggcggtccatctggcagtccctgaagatcgtgaaggagatcgccaagatcaagaaggccgcccccaagaaggtgttcgtggaggtggcccgggagaacgccgagaagaagcggaccgtgtcccggaagaacgcgctgatcgccctgtacaagaactgcaaggaggaggagcgcgactggatcgccgagctcgacgccaagaccgaccacgagctgcggcgggaccggctgtacctgtactacacccagatgggccggtgcatgtacaccggcaagcccatcgacctgaaccggctgttcgacaccaacgtgtacgacgtggaccacatcttcccccagtccaagatcaaggacgacagcctgtccaaccgggtgctggtggagcggaaggtgaacgccaagaagtccgacgtgtaccccctgcccgaggagatccggaacaagaaccggggcttctggacaatgctgcaccgcaaggagctgatctccaagcggaagtacgaccggctcacccgggtgacccccttcagcgactccgagctggccgacttcatcgcccgccagctggtggagacacgccagagcaccaaggccgtggcccaggtgctgaagaaggtgttccccgacaccgacgtggtgtacgtgaaggccgggaacgtgtcccggttcaggtacgacttcaagatgatcaaggtgcgggaggtgaacgactaccaccacgccaaggacgcctacctgaacatcgtggtgggcaacgtgtacgacaccaagttcaccaagagccccctgaacttcatccaggggaaggacgggaagaactactccctgaaccagatgttcaactacgacgtggagcggtccggcgtgatcgcctggaaggccggcgagaagggcaccatcaccaccgtgaagcggatgatgaagaagaacaacatccagttcacccgccacgccttcgaggtgaagggcgggctgttcgaccagaccatcatgaagaagggcaagggccaggtgcccatcaagagctccgacgtgcacctgagcgacatcagcaagtacggcggctacaacaaggccaacggcgcctacttcttcctggtggagcacaccgtgaagaagaagcgcatccgcaccctggagttcgccccggtgtacctggccaagaagctggagaaccggtccgccctgctggagtactgcaagaacgagctgaacctgctggagagcaggatcctgctgcccaaggtgaagatcaacacgatgttcgagatcgacggcttcaagatgcacatctccggccggaccggcaagcaggtcatcttcaagggcgccgagcagctgtgcatctccgagcagtacggcctggacatcaagaagatcaacaagtacatccagcggtgcaagctggcccgggagaacctgcccgtgaccgccttcgacggcatcagcacccacaacaacgacgtgctgtacagcgtgatgatgcagaagctgaaggacaccgtgtacggcatccacctgtccagccagctgaagaacctggagaagggcaaggaggtgttcgggaagctgtccctgaaggagcagtgcgaggtgctgatggaggccctgaacctgttcagctgcaacagcctgagcgccaacttcaagctgatcaacagcggggcctcctgcggcaccctgaagctgtccaacaacttcagcaaccgcaagtccttcatcctgtacaaccagtccatcaccgggctgttcgagcagaaggtggacctgctgcggctgaagcggcccgccgccaccaagaaggccggccaggccaagaagaagaaggactacaaggacgacgacgacaagtaa

SEQ ID NO: 735 - DNA, 4140 bp, synthetic construct
  source 1..4140: mol_type = other DNA
atggccccaaagaagaagcggaaagtcatgtccatcgccgagaagaacaacagcgagtactacctcggcctggacatcggcaccgacagcgtgggctgggccgtgaccgacctggactacaacatccagaagttcaacggcaaggccatgtggggcatccgcctgttcgaggccggcaagacggccgccgagcggcgggtgttccgcaccacccggcgccgcatccagcggcgcaagcaccgcatcgagctgctgcaggagctgttcgacagcgagatctccaaggccgacaccaacttctacctgcggctgaaggagagcaagtactgggtggaggaccgcacgctggggcagaccaacatcctgttcaacgaccccgagtacaccgacaaggactactacaagcagtaccccaccatctaccacctgcggaaggagctgatgaccagcgacgagccgcacgacgtgcggctcgtctacctggccatccaccacctgatcaagaaccggggccacttcctgttcgagggggagggccggaaggacgtcagctccttcaaggtgatcttccgggagctgtgccagtccatgcacgacgagatggagatcgtgctggaggccgccgacctggacgaggtggaggcggtgctgaagaaccgggagtacgggatcaccgacaagaaaacccggctgaacaagctcctgaccatcgacgacgagcacaagaaggagcagaagtccatcatcgccctgctggccgggggcaagaccaaggtggacgccctgttcggggagaaaacctccgaggacagcgacgtgaaggacatcaccttcgccggggacaagttcgaggagagcttcgacgccctgagcatcatgctcggggacaagatgttctgcctcgagaagatgaaggccatctacgactggtccatcctggaggagatcctccagggcgaggactacctgtcctacgccaaggtggccacctacgagaagcacaagaacgacctggccaccctgaagaagatcatgaagaagtaccggtccgacgagtacgacgcctgcttcaaggaccccggcaagaaggacaactactgcgcctacgtggggatggccaagaagggcaagaagaagctggtgctggagaagaagtgctcccaggaggacctgtgcaagtacctgggcaaggtgttcaaggacgtgaagcagaacgaccccgacctgcagtacctgatggccgagatccagcggggcaccctgctgcccaagcaggtgaacaaggacaacggggtcatcccccaccagctccacctggaggagctgcggatgatcctggccaacgtgaagaagtacctggagttcctgaacgacaaggacgactccgggttcaccgtgagcgagaagatcgagaagatcttcgccttccggatcccctactacgtggggcccctgaacgcccaccacaagtccctgggccactgctggatcgtgcggaacaagggcatggagaaccagaaggtgctgccctggaacttcgacgagatcgtgaacctggaggccagcgccaccgccttcatccgcaagatgaccagcaagtgcacctacgtgatcggcgccgacgtggtgcccaagaactccctggtgtacagcgagtttatggtgctgaacgagctgaacaacgtgaaggtgaacggggagctgctgcccgtcgagctgaaggagaaggtgttcgaggaggtgttcaagcgggtgaagcgggtgaccgggaagcggctgcgcgacttcctgatcgccgagggggccttcaagaagggcgacgagctgtccgggttcgaccagaacttcaagggctccctcaccgcctacctggacttcaagcgcatcctgggggagaagaagatccccaaggaggccatcgaggagatgatccaggccatcgtgctgttcggcgacgaccgcaagctgctgaagcggcgggtggagaagcggtacggcgagctgctctccaaggaggagatcgccgccatctgcaagctgaagtacaccggctggggccggctgagccgggagttcctggaggagatctacgtggtgaaccacaagaccggggagatgatcaacatcatctccatgatgcacgggaccaacgccaacctgatgcagctgctgagcagcgagtaccggttcaccgaggccctggaggcctacaacgaggagcggcagaccgaccactccgacatcgcctacgggatcgtgaaggacctgtacgtgagccccgccgtgcggcggtccatctggcagtccctgaagatcgtgaaggagatcgccaagatcaagaaggccgcccccaagaaggtgttcgtggaggtggcccgggagaacgccgagaagaagcggaccgtgtcccggaagaacgcgctgatcgccctgtacaagaactgcaaggaggaggagcgcgactggatcgccgagctcgacgccaagaccgaccacgagctgcggcgggaccggctgtacctgtactacacccagatgggccggtgcatgtacaccggcaagcccatcgacctgaaccggctgttcgacaccaacgtgtacgacgtggaccacatcttcccccagtccaagatcaaggacgacagcctgtccaaccgggtgctggtggagcggaaggtgaacgccaagaagtccgacgtgtaccccctgcccgaggagatccggaacaagaaccggggcttctggacaatgctgcaccgcaaggagctgatctccaagcggaagtacgaccggctcacccgggtgacccccttcagcgactccgagctggccgacttcatcgcccgccagctggtggagacacgccagagcaccaaggccgtggcccaggtgctgaagaaggtgttccccgacaccgacgtggtgtacgtgaaggccgggaacgtgtcccggttcaggtacgacttcaagatgatcaaggtgcgggaggtgaacgactaccaccacgccaaggacgcctacctgaacatcgtggtgggcaacgtgtacgacaccaagttcaccaagagccccctgaacttcatccaggggaaggacgggaagaactactccctgaaccagatgttcaactacgacgtggagcggtccggcgtgatcgcctggaaggccggcgagaagggcaccatcaccaccgtgaagcggatgatgaagaagaacaacatccagttcacccgccacgccttcgaggtgaagggcgggctgttcgaccagaccatcatgaagaagggcaagggccaggtgcccatcaagagctccgacgtgcacctgagcgacatcagcaagtacggcggctacaacaaggccaagggcgcctacttcttcctggtggagcacaccgtgaagaagaagcgcatccgcaccctggagttcgccccggtgtacctggccaagaagctggagaaccggtccgccctgctggagtactgcaagaacgagctgaacctgctggagagcaggatcctgctgcccaaggtgaagatcaacacgatgttcgagatcgacggcttcaagatgcacatctccggccggaccggcaagcaggtcatcttcaagggcgccgagcagctgtgcatctccgagcagtacggcctggacatcaagaagatcaacaagtacatccagcggtgcaagctggcccgggagaacctgcccgtgaccgccttcgacggcatcagcacccacaacaacgacgtgctgtacagcgtgatgatgcagaagctgaaggacaccgtgtacggcatccacctgtccagccagctgaagaacctggagaagggcaaggaggtgttcgggaagctgtccctgaaggagcagtgcgaggtgctgatggaggccctgaacctgttcagctgcaacagcctgagcgccaacttcaagctgatcaacagcggggcctcctgcggcaccctgaagctgtccaacaacttcagcaaccgcaagtccttcatcctgtacaaccagtccatcaccgggctgttcgagcagaaggtggacctgctgcggctgaagcggcccgccgccaccaagaaggccggccaggccaagaagaagaaggactacaaggacgacgacgacaagtaa

SEQ ID NO: 736 - DNA, 4140 bp, synthetic construct
  source 1..4140: mol_type = other DNA
atggccccaaagaagaagcggaaagtcatgtccatcgccgagaagaacaacagcgagtactacctcggcctggacatcggcaccgacagcgtgggctgggccgtgaccgacctggactacaacatccagaagttcaacggcaaggccatgtggggcatccgcctgttcgaggccggcaagacggccgccgagcggcgggtgttccgcaccacccggcgccgcatccagcggcgcaagcaccgcatcgagctgctgcaggagctgttcgacagcgagatctccaaggccgacaccaacttctacctgcggctgaaggagagcaagtactgggtggaggaccgcacgctggggcagaccaacatcctgttcaacgaccccgagtacaccgacaaggactactacaagcagtaccccaccatctaccacctgcggaaggagctgatgaccagcgacgagccgcacgacgtgcggctcgtctacctggccatccaccacctgatcaagaaccggggccacttcctgttcgagggggagggccggaaggacgtcagctccttcaaggtgatcttccgggagctgtgccagtccatgcacgacgagatggagatcgtgctggaggccgccgacctggacgaggtggaggcggtgctgaagaaccgggagtacgggatcaccgacaagaaaacccggctgaacaagctcctgaccatcgacgacgagcacaagaaggagcagaagtccatcatcgccctgctggccgggggcaagaccaaggtggacgccctgttcggggagaaaacctccgaggacagcgacgtgaaggacatcaccttcgccggggacaagttcgaggagagcttcgacgccctgagcatcatgctcggggacaagatgttctgcctcgagaagatgaaggccatctacgactggtccatcctggaggagatcctccagggcgaggactacctgtcctacgccaaggtggccacctacgagaagcacaagaacgacctggccaccctgaagaagatcatgaagaagtaccggtccgacgagtacgacgcctgcttcaaggaccccggcaagaaggacaactactgcgcctacgtggggatggccaagaagggcaagaagaagctggtgctggagaagaagtgctcccaggaggacctgtgcaagtacctgggcaaggtgttcaaggacgtgaagcagaacgaccccgacctgcagtacctgatggccgagatccagcggggcaccctgctgcccaagcaggtgaacaaggacaacggggtcatcccccaccagctccacctggaggagctgcggatgatcctggccaacgtgaagaagtacctggagttcctgaacgacaaggacgactccgggttcaccgtgagcgagaagatcgagaagatcttcgccttccggatcccctactacgtggggcccctgaacgcccaccacaagtccctgggccactgctggatcgtgcggaacaagggcatggagaaccagaaggtgctgccctggaacttcgacgagatcgtgaacctggaggccagcgccaccgccttcatccgcaagatgaccagcaagtgcacctacgtgatcggcgccgacgtggtgcccaagaactccctggtgtacagcgagtttatggtgctgaacgagctgaacaacgtgaaggtgaacggggagctgctgcccgtcgagctgaaggagaaggtgttcgaggaggtgttcaagcgggtgaagcgggtgaccgggaagcggctgcgcgacttcctgatcgccgagggggccttcaagaagggcgacgagctgtccgggttcgaccagaacttcaagggctccctcaccgcctacctggacttcaagcgcatcctgggggagaagaagatccccaaggaggccatcgaggagatgatccaggccatcgtgctgttcggcgacgaccgcaagctgctgaagcggcgggtggagaagcggtacggcgagctgctctccaaggaggagatcgccgccatctgcaagctgaagtacaccggctggggccggctgagccgggagttcctggaggagatctacgtggtgaaccacaagaccggggagatgatcaacatcatctccatgatgcacgggaccaacgccaacctgatgcagctgctgagcagcgagtaccggttcaccgaggccctggaggcctacaacgaggagcggcagaccgaccactccgacatcgcctacgggatcgtgaaggacctgtacgtgagccccgccgtgcggcggtccatctggcagtccctgaagatcgtgaaggagatcgccaagatcaagaaggccgcccccaagaaggtgttcgtggaggtggcccgggagaacgccgagaagaagcggaccgtgtcccggaagaacgcgctgatcgccctgtacaagaactgcaaggaggaggagcgcgactggatcgccgagctcgacgccaagaccgaccacgagctgcggcgggaccggctgtacctgtactacacccagatgggccggtgcatgtacaccggcaagcccatcgacctgaaccggctgttcgacaccaacgtgtacgacgtggaccacatcttcccccagtccaagatcaaggacgacagcctgtccaaccgggtgctggtggagcggaaggtgaacgccaagaagtccgacgtgtaccccctgcccgaggagatccggaacaagaaccggggcttctggacaatgctgcaccgcaaggagctgatctccaagcggaagtacgaccggctcacccgggtgacccccttcagcgactccgagctggccgacttcatcgcccgccagctggtggagacacgccagagcaccaaggccgtggcccaggtgctgaagaaggtgttccccgacaccgacgtggtgtacgtgaaggccgggaacgtgtcccggttcaggtacgacttcaagatgatcaaggtgcgggaggtgaacgactaccaccacgccaaggacgcctacctgaacatcgtggtgggcaacgtgtacgacaccaagttcaccaagagccccctgaacttcatccaggggaaggacgggaagaactactccctgaaccagatgttcaactacgacgtggagcggtccggcgtgatcgcctggaaggccggcgagaagggcaccatcaccaccgtgaagcggatgatgaagaagaacaacatccagttcacccgccacgccttcgaggtgaagggcgggctgttcgaccagaccatcatgaagaagggcaagggccaggtgcccatcaagagctccgacgtgcacctgagcgacatcagcaagtacggcggctacaacaaggccagaggcgcctacttcttcctggtggagcacaccgtgaagaagaagcgcatccgcaccctggagttcgccccggtgtacctggccaagaagctggagaaccggtccgccctgctggagtactgcaagaacgagctgaacctgctggagagcaggatcctgctgcccaaggtgaagatcaacacgatgttcgagatcgacggcttcaagatgcacatctccggccggaccggcaagcaggtcatcttcaagggcgccgagcagctgtgcatctccgagcagtacggcctggacatcaagaagatcaacaagtacatccagcggtgcaagctggcccgggagaacctgcccgtgaccgccttcgacggcatcagcacccacaacaacgacgtgctgtacagcgtgatgatgcagaagctgaaggacaccgtgtacggcatccacctgtccagccagctgaagaacctggagaagggcaaggaggtgttcgggaagctgtccctgaaggagcagtgcgaggtgctgatggaggccctgaacctgttcagctgcaacagcctgagcgccaacttcaagctgatcaacagcggggcctcctgcggcaccctgaagctgtccaacaacttcagcaaccgcaagtccttcatcctgtacaaccagtccatcaccgggctgttcgagcagaaggtggacctgctgcggctgaagcggcccgccgccaccaagaaggccggccaggccaagaagaagaaggactacaaggacgacgacgacaagtaa

SEQ ID NO: 737 - DNA, 4140 bp, synthetic construct
  source 1..4140: mol_type = other DNA
atggccccaaagaagaagcggaaagtcatgtccatcgccgagaagaacaacagcgagtactacctcggcctggacatcggcaccgacagcgtgggctgggccgtgaccgacctggactacaacatccagaagttcaacggcaaggccatgtggggcatccgcctgttcgaggccggcaagacggccgccgagcggcgggtgttccgcaccacccggcgccgcatccagcggcgcaagcaccgcatcgagctgctgcaggagctgttcgacagcgagatctccaaggccgacaccaacttctacctgcggctgaaggagagcaagtactgggtggaggaccgcacgctggggcagaccaacatcctgttcaacgaccccgagtacaccgacaaggactactacaagcagtaccccaccatctaccacctgcggaaggagctgatgaccagcgacgagccgcacgacgtgcggctcgtctacctggccatccaccacctgatcaagaaccggggccacttcctgttcgagggggagggccggaaggacgtcagctccttcaaggtgatcttccgggagctgtgccagtccatgcacgacgagatggagatcgtgctggaggccgccgacctggacgaggtggaggcggtgctgaagaaccgggagtacgggatcaccgacaagaaaacccggctgaacaagctcctgaccatcgacgacgagcacaagaaggagcagaagtccatcatcgccctgctggccgggggcaagaccaaggtggacgccctgttcggggagaaaacctccgaggacagcgacgtgaaggacatcaccttcgccggggacaagttcgaggagagcttcgacgccctgagcatcatgctcggggacaagatgttctgcctcgagaagatgaaggccatctacgactggtccatcctggaggagatcctccagggcgaggactacctgtcctacgccaaggtggccacctacgagaagcacaagaacgacctggccaccctgaagaagatcatgaagaagtaccggtccgacgagtacgacgcctgcttcaaggaccccggcaagaaggacaactactgcgcctacgtggggatggccaagaagggcaagaagaagctggtgctggagaagaagtgctcccaggaggacctgtgcaagtacctgggcaaggtgttcaaggacgtgaagcagaacgaccccgacctgcagtacctgatggccgagatccagcggggcaccctgctgcccaagcaggtgaacaaggacaacggggtcatcccccaccagctccacctggaggagctgcggatgatcctggccaacgtgaagaagtacctggagttcctgaacgacaaggacgactccgggttcaccgtgagcgagaagatcgagaagatcttcgccttccggatcccctactacgtggggcccctgaacgcccaccacaagtccctgggccactgctggatcgtgcggaacaagggcatggagaaccagaaggtgctgccctggaacttcgacgagatcgtgaacctggaggccagcgccaccgccttcatccgcaagatgaccagcaagtgcacctacgtgatcggcgccgacgtggtgcccaagaactccctggtgtacagcgagtttatggtgctgaacgagctgaacaacgtgaaggtgaacggggagctgctgcccgtcgagctgaaggagaaggtgttcgaggaggtgttcaagcgggtgaagcgggtgaccgggaagcggctgcgcgacttcctgatcgccgagggggccttcaagaagggcgacgagctgtccgggttcgaccagaacttcaagggctccctcaccgcctacctggacttcaagcgcatcctgggggagaagaagatccccaaggaggccatcgaggagatgatccaggccatcgtgctgttcggcgacgaccgcaagctgctgaagcggcgggtggagaagcggtacggcgagctgctctccaaggaggagatcgccgccatctgcaagctgaagtacaccggctggggccggctgagccgggagttcctggaggagatctacgtggtgaaccacaagaccggggagatgatcaacatcatctccatgatgcacgggaccaacgccaacctgatgcagctgctgagcagcgagtaccggttcaccgaggccctggaggcctacaacgaggagcggcagaccgaccactccgacatcgcctacgggatcgtgaaggacctgtacgtgagccccgccgtgcggcggtccatctggcagtccctgaagatcgtgaaggagatcgccaagatcaagaaggccgcccccaagaaggtgttcgtggaggtggcccgggagaacgccgagaagaagcggaccgtgtcccggaagaacgcgctgatcgccctgtacaagaactgcaaggaggaggagcgcgactggatcgccgagctcgacgccaagaccgaccacgagctgcggcgggaccggctgtacctgtactacacccagatgggccggtgcatgtacaccggcaagcccatcgacctgaaccggctgttcgacaccaacgtgtacgacgtggaccacatcttcccccagtccaagatcaaggacgacagcctgtccaaccgggtgctggtggagcggaaggtgaacgccaagaagtccgacgtgtaccccctgcccgaggagatccggaacaagaaccggggcttctggacaatgctgcaccgcaaggagctgatctccaagcggaagtacgaccggctcacccgggtgacccccttcagcgactccgagctggccgacttcatcgcccgccagctggtggagacacgccagagcaccaaggccgtggcccaggtgctgaagaaggtgttccccgacaccgacgtggtgtacgtgaaggccgggaacgtgtcccggttcaggtacgacttcaagatgatcaaggtgcgggaggtgaacgactaccaccacgccaaggacgcctacctgaacatcgtggtgggcaacgtgtacgacaccaagttcaccaagagccccctgaacttcatccaggggaaggacgggaagaactactccctgaaccagatgttcaactacgacgtggagcggtccggcgtgatcgcctggaaggccggcgagaagggcaccatcaccaccgtgaagcggatgatgaagaagaacaacatccagttcacccgccacgccttcgaggtgaagggcgggctgttcgaccagaccatcatgaagaagggcaagggccaggtgcccatcaagagctccgacgtgcacctgagcgacatcagcaagtacggcggctacaacaaggccgccggcgcctacttcttcctggtggagcacaccgtgaagaagaagcgcatccgcaccctggagttcgccccggtgtacctggccaagaagctggagaaccggtccgccctgctggagtactgcaagaacgagctgaacctgctggagagcaggatcctgctgcccaaggtgaagatcaacacgatgttcgagatcgacggcttcaagatgcacatctccggccggaccggcaagaacgtcatcttcaagggcgccgagcagctgtgcatctccgagcagtacggcctggacatcaagaagatcaacaagtacatccagcggtgcaagctggcccgggagaacctgcccgtgaccgccttcgacggcatcagcacccacaacaacgacgtgctgtacagcgtgatgatgcagaagctgaaggacaccgtgtacggcatccacctgtccagccagctgaagaacctggagaagggcaaggaggtgttcgggaagctgtccctgaaggagcagtgcgaggtgctgatggaggccctgaacctgttcagctgcaacagcctgagcgccaacttcaagctgatcaacagcggggcctcctgcggcaccctgaagctgtccaacaacttcagcaaccgcaagtccttcatcctgtacaaccagtccatcaccgggctgttcgagcagaaggtggacctgctgcggctgaagcggcccgccgccaccaagaaggccggccaggccaagaagaagaaggactacaaggacgacgacgacaagtaa

SEQ ID NO: 738 - DNA, 4140 bp, synthetic construct
  source 1..4140: mol_type = other DNA
atggccccaaagaagaagcggaaagtcatgtccatcgccgagaagaacaacagcgagtactacctcggcctggacatcggcaccgacagcgtgggctgggccgtgaccgacctggactacaacatccagaagttcaacggcaaggccatgtggggcatccgcctgttcgaggccggcaagacggccgccgagcggcgggtgttccgcaccacccggcgccgcatccagcggcgcaagcaccgcatcgagctgctgcaggagctgttcgacagcgagatctccaaggccgacaccaacttctacctgcggctgaaggagagcaagtactgggtggaggaccgcacgctggggcagaccaacatcctgttcaacgaccccgagtacaccgacaaggactactacaagcagtaccccaccatctaccacctgcggaaggagctgatgaccagcgacgagccgcacgacgtgcggctcgtctacctggccatccaccacctgatcaagaaccggggccacttcctgttcgagggggagggccggaaggacgtcagctccttcaaggtgatcttccgggagctgtgccagtccatgcacgacgagatggagatcgtgctggaggccgccgacctggacgaggtggaggcggtgctgaagaaccgggagtacgggatcaccgacaagaaaacccggctgaacaagctcctgaccatcgacgacgagcacaagaaggagcagaagtccatcatcgccctgctggccgggggcaagaccaaggtggacgccctgttcggggagaaaacctccgaggacagcgacgtgaaggacatcaccttcgccggggacaagttcgaggagagcttcgacgccctgagcatcatgctcggggacaagatgttctgcctcgagaagatgaaggccatctacgactggtccatcctggaggagatcctccagggcgaggactacctgtcctacgccaaggtggccacctacgagaagcacaagaacgacctggccaccctgaagaagatcatgaagaagtaccggtccgacgagtacgacgcctgcttcaaggaccccggcaagaaggacaactactgcgcctacgtggggatggccaagaagggcaagaagaagctggtgctggagaagaagtgctcccaggaggacctgtgcaagtacctgggcaaggtgttcaaggacgtgaagcagaacgaccccgacctgcagtacctgatggccgagatccagcggggcaccctgctgcccaagcaggtgaacaaggacaacggggtcatcccccaccagctccacctggaggagctgcggatgatcctggccaacgtgaagaagtacctggagttcctgaacgacaaggacgactccgggttcaccgtgagcgagaagatcgagaagatcttcgccttccggatcccctactacgtggggcccctgaacgcccaccacaagtccctgggccactgctggatcgtgcggaacaagggcatggagaaccagaaggtgctgccctggaacttcgacgagatcgtgaacctggaggccagcgccaccgccttcatccgcaagatgaccagcaagtgcacctacgtgatcggcgccgacgtggtgcccaagaactccctggtgtacagcgagtttatggtgctgaacgagctgaacaacgtgaaggtgaacggggagctgctgcccgtcgagctgaaggagaaggtgttcgaggaggtgttcaagcgggtgaagcgggtgaccgggaagcggctgcgcgacttcctgatcgccgagggggccttcaagaagggcgacgagctgtccgggttcgaccagaacttcaagggctccctcaccgcctacctggacttcaagcgcatcctgggggagaagaagatccccaaggaggccatcgaggagatgatccaggccatcgtgctgttcggcgacgaccgcaagctgctgaagcggcgggtggagaagcggtacggcgagctgctctccaaggaggagatcgccgccatctgcaagctgaagtacaccggctggggccggctgagccgggagttcctggaggagatctacgtggtgaaccacaagaccggggagatgatcaacatcatctccatgatgcacgggaccaacgccaacctgatgcagctgctgagcagcgagtaccggttcaccgaggccctggaggcctacaacgaggagcggcagaccgaccactccgacatcgcctacgggatcgtgaaggacctgtacgtgagccccgccgtgcggcggtccatctggcagtccctgaagatcgtgaaggagatcgccaagatcaagaaggccgcccccaagaaggtgttcgtggaggtggcccgggagaacgccgagaagaagcggaccgtgtcccggaagaacgcgctgatcgccctgtacaagaactgcaaggaggaggagcgcgactggatcgccgagctcgacgccaagaccgaccacgagctgcggcgggaccggctgtacctgtactacacccagatgggccggtgcatgtacaccggcaagcccatcgacctgaaccggctgttcgacaccaacgtgtacgacgtggaccacatcttcccccagtccaagatcaaggacgacagcctgtccaaccgggtgctggtggagcggaaggtgaacgccaagaagtccgacgtgtaccccctgcccgaggagatccggaacaagaaccggggcttctggacaatgctgcaccgcaaggagctgatctccaagcggaagtacgaccggctcacccgggtgacccccttcagcgactccgagctggccgacttcatcgcccgccagctggtggagacacgccagagcaccaaggccgtggcccaggtgctgaagaaggtgttccccgacaccgacgtggtgtacgtgaaggccgggaacgtgtcccggttcaggtacgacttcaagatgatcaaggtgcgggaggtgaacgactaccaccacgccaaggacgcctacctgaacatcgtggtgggcaacgtgtacgacaccaagttcaccaagagccccctgaacttcatccaggggaaggacgggaagaactactccctgaaccagatgttcaactacgacgtggagcggtccggcgtgatcgcctggaaggccggcgagaagggcaccatcaccaccgtgaagcggatgatgaagaagaacaacatccagttcacccgccacgccttcgaggtgaagggcgggctgttcgaccagaccatcatgaagaagggcaagggccaggtgcccatcaagagctccgacgtgcacctgagcgacatcagcaagtacggcggctacaacaaggccgccggcgcctacttcttcctggtggagcacaccgtgaagaagaagcgcatccgcaccctggagttcgccccggtgtacctggccaagaagctggagaaccggtccgccctgctggagtactgcaagaacgagctgaacctgctggagagcaggatcctgctgcccaaggtgaagatcaacacgatgttcgagatcgacggcttcaagatgcacatctccggccggaccggcaagaaggtcatcttcaagggcgccgagcagctgtgcatctccgagcagtacggcctggacatcaagaagatcaacaagtacatccagcggtgcaagctggcccgggagaacctgcccgtgaccgccttcgacggcatcagcacccacaacaacgacgtgctgtacagcgtgatgatgcagaagctgaaggacaccgtgtacggcatccacctgtccagccagctgaagaacctggagaagggcaaggaggtgttcgggaagctgtccctgaaggagcagtgcgaggtgctgatggaggccctgaacctgttcagctgcaacagcctgagcgccaacttcaagctgatcaacagcggggcctcctgcggcaccctgaagctgtccaacaacttcagcaaccgcaagtccttcatcctgtacaaccagtccatcaccgggctgttcgagcagaaggtggacctgctgcggctgaagcggcccgccgccaccaagaaggccggccaggccaagaagaagaaggactacaaggacgacgacgacaagtaa

SEQ ID NO: 739 - DNA, 4140 bp, synthetic construct
  source 1..4140: mol_type = other DNA
atggccccaaagaagaagcggaaagtcatgtccatcgccgagaagaacaacagcgagtactacctcggcctggacatcggcaccgacagcgtgggctgggccgtgaccgacctggactacaacatccagaagttcaacggcaaggccatgtggggcatccgcctgttcgaggccggcaagacggccgccgagcggcgggtgttccgcaccacccggcgccgcatccagcggcgcaagcaccgcatcgagctgctgcaggagctgttcgacagcgagatctccaaggccgacaccaacttctacctgcggctgaaggagagcaagtactgggtggaggaccgcacgctggggcagaccaacatcctgttcaacgaccccgagtacaccgacaaggactactacaagcagtaccccaccatctaccacctgcggaaggagctgatgaccagcgacgagccgcacgacgtgcggctcgtctacctggccatccaccacctgatcaagaaccggggccacttcctgttcgagggggagggccggaaggacgtcagctccttcaaggtgatcttccgggagctgtgccagtccatgcacgacgagatggagatcgtgctggaggccgccgacctggacgaggtggaggcggtgctgaagaaccgggagtacgggatcaccgacaagaaaacccggctgaacaagctcctgaccatcgacgacgagcacaagaaggagcagaagtccatcatcgccctgctggccgggggcaagaccaaggtggacgccctgttcggggagaaaacctccgaggacagcgacgtgaaggacatcaccttcgccggggacaagttcgaggagagcttcgacgccctgagcatcatgctcggggacaagatgttctgcctcgagaagatgaaggccatctacgactggtccatcctggaggagatcctccagggcgaggactacctgtcctacgccaaggtggccacctacgagaagcacaagaacgacctggccaccctgaagaagatcatgaagaagtaccggtccgacgagtacgacgcctgcttcaaggaccccggcaagaaggacaactactgcgcctacgtggggatggccaagaagggcaagaagaagctggtgctggagaagaagtgctcccaggaggacctgtgcaagtacctgggcaaggtgttcaaggacgtgaagcagaacgaccccgacctgcagtacctgatggccgagatccagcggggcaccctgctgcccaagcaggtgaacaaggacaacggggtcatcccccaccagctccacctggaggagctgcggatgatcctggccaacgtgaagaagtacctggagttcctgaacgacaaggacgactccgggttcaccgtgagcgagaagatcgagaagatcttcgccttccggatcccctactacgtggggcccctgaacgcccaccacaagtccctgggccactgctggatcgtgcggaacaagggcatggagaaccagaaggtgctgccctggaacttcgacgagatcgtgaacctggaggccagcgccaccgccttcatccgcaagatgaccagcaagtgcacctacgtgatcggcgccgacgtggtgcccaagaactccctggtgtacagcgagtttatggtgctgaacgagctgaacaacgtgaaggtgaacggggagctgctgcccgtcgagctgaaggagaaggtgttcgaggaggtgttcaagcgggtgaagcgggtgaccgggaagcggctgcgcgacttcctgatcgccgagggggccttcaagaagggcgacgagctgtccgggttcgaccagaacttcaagggctccctcaccgcctacctggacttcaagcgcatcctgggggagaagaagatccccaaggaggccatcgaggagatgatccaggccatcgtgctgttcggcgacgaccgcaagctgctgaagcggcgggtggagaagcggtacggcgagctgctctccaaggaggagatcgccgccatctgcaagctgaagtacaccggctggggccggctgagccgggagttcctggaggagatctacgtggtgaaccacaagaccggggagatgatcaacatcatctccatgatgcacgggaccaacgccaacctgatgcagctgctgagcagcgagtaccggttcaccgaggccctggaggcctacaacgaggagcggcagaccgaccactccgacatcgcctacgggatcgtgaaggacctgtacgtgagccccgccgtgcggcggtccatctggcagtccctgaagatcgtgaaggagatcgccaagatcaagaaggccgcccccaagaaggtgttcgtggaggtggcccgggagaacgccgagaagaagcggaccgtgtcccggaagaacgcgctgatcgccctgtacaagaactgcaaggaggaggagcgcgactggatcgccgagctcgacgccaagaccgaccacgagctgcggcgggaccggctgtacctgtactacacccagatgggccggtgcatgtacaccggcaagcccatcgacctgaaccggctgttcgacaccaacgtgtacgacgtggaccacatcttcccccagtccaagatcaaggacgacagcctgtccaaccgggtgctggtggagcggaaggtgaacgccaagaagtccgacgtgtaccccctgcccgaggagatccggaacaagaaccggggcttctggacaatgctgcaccgcaaggagctgatctccaagcggaagtacgaccggctcacccgggtgacccccttcagcgactccgagctggccgacttcatcgcccgccagctggtggagacacgccagagcaccaaggccgtggcccaggtgctgaagaaggtgttccccgacaccgacgtggtgtacgtgaaggccgggaacgtgtcccggttcaggtacgacttcaagatgatcaaggtgcgggaggtgaacgactaccaccacgccaaggacgcctacctgaacatcgtggtgggcaacgtgtacgacaccaagttcaccaagagccccctgaacttcatccaggggaaggacgggaagaactactccctgaaccagatgttcaactacgacgtggagcggtccggcgtgatcgcctggaaggccggcgagaagggcaccatcaccaccgtgaagcggatgatgaagaagaacaacatccagttcacccgccacgccttcgaggtgaagggcgggctgttcgaccagaccatcatgaagaagggcaagggccaggtgcccatcaagagctccgacgtgcacctgagcgacatcagcaagtacggcggctacaacaaggccgccggcgcctacttcttcctggtggagcacaccgtgaagaagaagcgcatccgcaccctggagttcgccccggtgtacctggccaagaagctggagaaccggtccgccctgctggagtactgcaagaacgagctgaacctgctggagagcaggatcctgctgcccaaggtgaagatcaacacgatgttcgagatcgacggcttcaagatgcacatctccggccggaccggcaaggtcgtcatcttcaagggcgccgagcagctgtgcatctccgagcagtacggcctggacatcaagaagatcaacaagtacatccagcggtgcaagctggcccgggagaacctgcccgtgaccgccttcgacggcatcagcacccacaacaacgacgtgctgtacagcgtgatgatgcagaagctgaaggacaccgtgtacggcatccacctgtccagccagctgaagaacctggagaagggcaaggaggtgttcgggaagctgtccctgaaggagcagtgcgaggtgctgatggaggccctgaacctgttcagctgcaacagcctgagcgccaacttcaagctgatcaacagcggggcctcctgcggcaccctgaagctgtccaacaacttcagcaaccgcaagtccttcatcctgtacaaccagtccatcaccgggctgttcgagcagaaggtggacctgctgcggctgaagcggcccgccgccaccaagaaggccggccaggccaagaagaagaaggactacaaggacgacgacgacaagtaa

SEQ ID NO: 740 - DNA, 4140 bp, synthetic construct
  source 1..4140: mol_type = other DNA
atggccccaaagaagaagcggaaagtcatgtccatcgccgagaagaacaacagcgagtactacctcggcctggacatcggcaccgacagcgtgggctgggccgtgaccgacctggactacaacatccagaagttcaacggcaaggccatgtggggcatccgcctgttcgaggccggcaagacggccgccgagcggcgggtgttccgcaccacccggcgccgcatccagcggcgcaagcaccgcatcgagctgctgcaggagctgttcgacagcgagatctccaaggccgacaccaacttctacctgcggctgaaggagagcaagtactgggtggaggaccgcacgctggggcagaccaacatcctgttcaacgaccccgagtacaccgacaaggactactacaagcagtaccccaccatctaccacctgcggaaggagctgatgaccagcgacgagccgcacgacgtgcggctcgtctacctggccatccaccacctgatcaagaaccggggccacttcctgttcgagggggagggccggaaggacgtcagctccttcaaggtgatcttccgggagctgtgccagtccatgcacgacgagatggagatcgtgctggaggccgccgacctggacgaggtggaggcggtgctgaagaaccgggagtacgggatcaccgacaagaaaacccggctgaacaagctcctgaccatcgacgacgagcacaagaaggagcagaagtccatcatcgccctgctggccgggggcaagaccaaggtggacgccctgttcggggagaaaacctccgaggacagcgacgtgaaggacatcaccttcgccggggacaagttcgaggagagcttcgacgccctgagcatcatgctcggggacaagatgttctgcctcgagaagatgaaggccatctacgactggtccatcctggaggagatcctccagggcgaggactacctgtcctacgccaaggtggccacctacgagaagcacaagaacgacctggccaccctgaagaagatcatgaagaagtaccggtccgacgagtacgacgcctgcttcaaggaccccggcaagaaggacaactactgcgcctacgtggggatggccaagaagggcaagaagaagctggtgctggagaagaagtgctcccaggaggacctgtgcaagtacctgggcaaggtgttcaaggacgtgaagcagaacgaccccgacctgcagtacctgatggccgagatccagcggggcaccctgctgcccaagcaggtgaacaaggacaacggggtcatcccccaccagctccacctggaggagctgcggatgatcctggccaacgtgaagaagtacctggagttcctgaacgacaaggacgactccgggttcaccgtgagcgagaagatcgagaagatcttcgccttccggatcccctactacgtggggcccctgaacgcccaccacaagtccctgggccactgctggatcgtgcggaacaagggcatggagaaccagaaggtgctgccctggaacttcgacgagatcgtgaacctggaggccagcgccaccgccttcatccgcaagatgaccagcaagtgcacctacgtgatcggcgccgacgtggtgcccaagaactccctggtgtacagcgagtttatggtgctgaacgagctgaacaacgtgaaggtgaacggggagctgctgcccgtcgagctgaaggagaaggtgttcgaggaggtgttcaagcgggtgaagcgggtgaccgggaagcggctgcgcgacttcctgatcgccgagggggccttcaagaagggcgacgagctgtccgggttcgaccagaacttcaagggctccctcaccgcctacctggacttcaagcgcatcctgggggagaagaagatccccaaggaggccatcgaggagatgatccaggccatcgtgctgttcggcgacgaccgcaagctgctgaagcggcgggtggagaagcggtacggcgagctgctctccaaggaggagatcgccgccatctgcaagctgaagtacaccggctggggccggctgagccgggagttcctggaggagatctacgtggtgaaccacaagaccggggagatgatcaacatcatctccatgatgcacgggaccaacgccaacctgatgcagctgctgagcagcgagtaccggttcaccgaggccctggaggcctacaacgaggagcggcagaccgaccactccgacatcgcctacgggatcgtgaaggacctgtacgtgagccccgccgtgcggcggtccatctggcagtccctgaagatcgtgaaggagatcgccaagatcaagaaggccgcccccaagaaggtgttcgtggaggtggcccgggagaacgccgagaagaagcggaccgtgtcccggaagaacgcgctgatcgccctgtacaagaactgcaaggaggaggagcgcgactggatcgccgagctcgacgccaagaccgaccacgagctgcggcgggaccggctgtacctgtactacacccagatgggccggtgcatgtacaccggcaagcccatcgacctgaaccggctgttcgacaccaacgtgtacgacgtggaccacatcttcccccagtccaagatcaaggacgacagcctgtccaaccgggtgctggtggagcggaaggtgaacgccaagaagtccgacgtgtaccccctgcccgaggagatccggaacaagaaccggggcttctggacaatgctgcaccgcaaggagctgatctccaagcggaagtacgaccggctcacccgggtgacccccttcagcgactccgagctggccgacttcatcgcccgccagctggtggagacacgccagagcaccaaggccgtggcccaggtgctgaagaaggtgttccccgacaccgacgtggtgtacgtgaaggccgggaacgtgtcccggttcaggtacgacttcaagatgatcaaggtgcgggaggtgaacgactaccaccacgccaaggacgcctacctgaacatcgtggtgggcaacgtgtacgacaccaagttcaccaagagccccctgaacttcatccaggggaaggacgggaagaactactccctgaaccagatgttcaactacgacgtggagcggtccggcgtgatcgcctggaaggccggcgagaagggcaccatcaccaccgtgaagcggatgatgaagaagaacaacatccagttcacccgccacgccttcgaggtgaagggcgggctgttcgaccagaccatcatgaagaagggcaagggccaggtgcccatcaagagctccgacgtgcacctgagcgacatcagcaagtacggcggctacaacaaggccgccggcgcctacttcttcctggtggagcacaccgtgaagaagaagcgcatccgcaccctggagttcgccccggtgtacctggccaagaagctggagaaccggtccgccctgctggagtactgcaagaacgagctgaacctgctggagagcaggatcctgctgcccaaggtgaagatcaacacgatgttcgagatcgacggcttcaagatgcacatctccggccggaccggcaagcaggtcatcttcaagggcgccgagcagctgtgcatctccgagcagtacggcctggacatcaagaagatcaacaagtacatccagcggtgcaagctggcccgggagaacctgcccgtgaccgccttcgacggcatcagcacccacaacaacgacgtgctgtacagcgtgatgatgcagaagctgaaggacaccgtgtacggcatccacctgtccagccagctgaagaacctggagaagggcaaggaggtgttcgggaagctgtccctgaaggagcagtgcgaggtgctgatggaggccctgaacctgttcagctgcaacagcagaagcgccaacttcaagctgatcaacagcggggcctcctgcggcaccctgaagctgtccaacaacttcagcaaccgcaagtccttcatcctgtacaaccagtccatcaccgggctgttcgagcagaaggtggacctgctgcggctgaagcggcccgccgccaccaagaaggccggccaggccaagaagaagaaggactacaaggacgacgacgacaagtaa

SEQ ID NO: 741 - DNA, 4140 bp, synthetic construct
  source 1..4140: mol_type = other DNA
atggccccaaagaagaagcggaaagtcatgtccatcgccgagaagaacaacagcgagtactacctcggcctggacatcggcaccgacagcgtgggctgggccgtgaccgacctggactacaacatccagaagttcaacggcaaggccatgtggggcatccgcctgttcgaggccggcaagacggccgccgagcggcgggtgttccgcaccacccggcgccgcatccagcggcgcaagcaccgcatcgagctgctgcaggagctgttcgacagcgagatctccaaggccgacaccaacttctacctgcggctgaaggagagcaagtactgggtggaggaccgcacgctggggcagaccaacatcctgttcaacgaccccgagtacaccgacaaggactactacaagcagtaccccaccatctaccacctgcggaaggagctgatgaccagcgacgagccgcacgacgtgcggctcgtctacctggccatccaccacctgatcaagaaccggggccacttcctgttcgagggggagggccggaaggacgtcagctccttcaaggtgatcttccgggagctgtgccagtccatgcacgacgagatggagatcgtgctggaggccgccgacctggacgaggtggaggcggtgctgaagaaccgggagtacgggatcaccgacaagaaaacccggctgaacaagctcctgaccatcgacgacgagcacaagaaggagcagaagtccatcatcgccctgctggccgggggcaagaccaaggtggacgccctgttcggggagaaaacctccgaggacagcgacgtgaaggacatcaccttcgccggggacaagttcgaggagagcttcgacgccctgagcatcatgctcggggacaagatgttctgcctcgagaagatgaaggccatctacgactggtccatcctggaggagatcctccagggcgaggactacctgtcctacgccaaggtggccacctacgagaagcacaagaacgacctggccaccctgaagaagatcatgaagaagtaccggtccgacgagtacgacgcctgcttcaaggaccccggcaagaaggacaactactgcgcctacgtggggatggccaagaagggcaagaagaagctggtgctggagaagaagtgctcccaggaggacctgtgcaagtacctgggcaaggtgttcaaggacgtgaagcagaacgaccccgacctgcagtacctgatggccgagatccagcggggcaccctgctgcccaagcaggtgaacaaggacaacggggtcatcccccaccagctccacctggaggagctgcggatgatcctggccaacgtgaagaagtacctggagttcctgaacgacaaggacgactccgggttcaccgtgagcgagaagatcgagaagatcttcgccttccggatcccctactacgtggggcccctgaacgcccaccacaagtccctgggccactgctggatcgtgcggaacaagggcatggagaaccagaaggtgctgccctggaacttcgacgagatcgtgaacctggaggccagcgccaccgccttcatccgcaagatgaccagcaagtgcacctacgtgatcggcgccgacgtggtgcccaagaactccctggtgtacagcgagtttatggtgctgaacgagctgaacaacgtgaaggtgaacggggagctgctgcccgtcgagctgaaggagaaggtgttcgaggaggtgttcaagcgggtgaagcgggtgaccgggaagcggctgcgcgacttcctgatcgccgagggggccttcaagaagggcgacgagctgtccgggttcgaccagaacttcaagggctccctcaccgcctacctggacttcaagcgcatcctgggggagaagaagatccccaaggaggccatcgaggagatgatccaggccatcgtgctgttcggcgacgaccgcaagctgctgaagcggcgggtggagaagcggtacggcgagctgctctccaaggaggagatcgccgccatctgcaagctgaagtacaccggctggggccggctgagccgggagttcctggaggagatctacgtggtgaaccacaagaccggggagatgatcaacatcatctccatgatgcacgggaccaacgccaacctgatgcagctgctgagcagcgagtaccggttcaccgaggccctggaggcctacaacgaggagcggcagaccgaccactccgacatcgcctacgggatcgtgaaggacctgtacgtgagccccgccgtgcggcggtccatctggcagtccctgaagatcgtgaaggagatcgccaagatcaagaaggccgcccccaagaaggtgttcgtggaggtggcccgggagaacgccgagaagaagcggaccgtgtcccggaagaacgcgctgatcgccctgtacaagaactgcaaggaggaggagcgcgactggatcgccgagctcgacgccaagaccgaccacgagctgcggcgggaccggctgtacctgtactacacccagatgggccggtgcatgtacaccggcaagcccatcgacctgaaccggctgttcgacaccaacgtgtacgacgtggaccacatcttcccccagtccaagatcaaggacgacagcctgtccaaccgggtgctggtggagcggaaggtgaacgccaagaagtccgacgtgtaccccctgcccgaggagatccggaacaagaaccggggcttctggacaatgctgcaccgcaaggagctgatctccaagcggaagtacgaccggctcacccgggtgacccccttcagcgactccgagctggccgacttcatcgcccgccagctggtggagacacgccagagcaccaaggccgtggcccaggtgctgaagaaggtgttccccgacaccgacgtggtgtacgtgaaggccgggaacgtgtcccggttcaggtacgacttcaagatgatcaaggtgcgggaggtgaacgactaccaccacgccaaggacgcctacctgaacatcgtggtgggcaacgtgtacgacaccaagttcaccaagagccccctgaacttcatccaggggaaggacgggaagaactactccctgaaccagatgttcaactacgacgtggagcggtccggcgtgatcgcctggaaggccggcgagaagggcaccatcaccaccgtgaagcggatgatgaagaagaacaacatccagttcacccgccacgccttcgaggtgaagggcgggctgttcgaccagaccatcatgaagaagggcaagggccaggtgcccatcaagagctccgacgtgcacctgagcgacatcagcaagtacggcggctacaacaaggccagaggcgcctacttcttcctggtggagcacaccgtgaagaagaagcgcatccgcaccctggagttcgccccggtgtacctggccaagaagctggagaaccggtccgccctgctggagtactgcaagaacgagctgaacctgctggagagcaggatcctgctgcccaaggtgaagatcaacacgatgttcgagatcgacggcttcaagatgcacatctccggccggaccggcaagcaggtcatcttcaagggcgccgagcagctgtgcatctccgagcagtacggcctggacatcaagaagatcaacaagtacatccagcggtgcaagctggcccgggagaacctgcccgtgaccgccttcgacggcatcagcacccacaacaacgacgtgctgtacagcgtgatgatgcagaagctgaaggacaccgtgtacggcatccacctgtccagccagctgaagaacctggagaagggcaaggaggtgttcgggaagctgtccctgaaggagcagtgcgaggtgctgatggaggccctgaacctgttcagctgcaacagcctgagcgccaacttcaagctgatcaacagcggggcctcctgcggcaccctgcagctgtccaacaacttcagcaaccgcaagtccttcatcctgtacaaccagtccatcaccgggctgttcgagcagaaggtggacctgctgcggctgaagcggcccgccgccaccaagaaggccggccaggccaagaagaagaaggactacaaggacgacgacgacaagtaa

SEQ ID NO: 742 - DNA, 4140 bp, synthetic construct
  source 1..4140: mol_type = other DNA
atggccccaaagaagaagcggaaagtcatgtccatcgccgagaagaacaacagcgagtactacctcggcctggacatcggcaccgacagcgtgggctgggccgtgaccgacctggactacaacatccagaagttcaacggcaaggccatgtggggcatccgcctgttcgaggccggcaagacggccgccgagcggcgggtgttccgcaccacccggcgccgcatccagcggcgcaagcaccgcatcgagctgctgcaggagctgttcgacagcgagatctccaaggccgacaccaacttctacctgcggctgaaggagagcaagtactgggtggaggaccgcacgctggggcagaccaacatcctgttcaacgaccccgagtacaccgacaaggactactacaagcagtaccccaccatctaccacctgcggaaggagctgatgaccagcgacgagccgcacgacgtgcggctcgtctacctggccatccaccacctgatcaagaaccggggccacttcctgttcgagggggagggccggaaggacgtcagctccttcaaggtgatcttccgggagctgtgccagtccatgcacgacgagatggagatcgtgctggaggccgccgacctggacgaggtggaggcggtgctgaagaaccgggagtacgggatcaccgacaagaaaacccggctgaacaagctcctgaccatcgacgacgagcacaagaaggagcagaagtccatcatcgccctgctggccgggggcaagaccaaggtggacgccctgttcggggagaaaacctccgaggacagcgacgtgaaggacatcaccttcgccggggacaagttcgaggagagcttcgacgccctgagcatcatgctcggggacaagatgttctgcctcgagaagatgaaggccatctacgactggtccatcctggaggagatcctccagggcgaggactacctgtcctacgccaaggtggccacctacgagaagcacaagaacgacctggccaccctgaagaagatcatgaagaagtaccggtccgacgagtacgacgcctgcttcaaggaccccggcaagaaggacaactactgcgcctacgtggggatggccaagaagggcaagaagaagctggtgctggagaagaagtgctcccaggaggacctgtgcaagtacctgggcaaggtgttcaaggacgtgaagcagaacgaccccgacctgcagtacctgatggccgagatccagcggggcaccctgctgcccaagcaggtgaacaaggacaacggggtcatcccccaccagctccacctggaggagctgcggatgatcctggccaacgtgaagaagtacctggagttcctgaacgacaaggacgactccgggttcaccgtgagcgagaagatcgagaagatcttcgccttccggatcccctactacgtggggcccctgaacgcccaccacaagtccctgggccactgctggatcgtgcggaacaagggcatggagaaccagaaggtgctgccctggaacttcgacgagatcgtgaacctggaggccagcgccaccgccttcatccgcaagatgaccagcaagtgcacctacgtgatcggcgccgacgtggtgcccaagaactccctggtgtacagcgagtttatggtgctgaacgagctgaacaacgtgaaggtgaacggggagctgctgcccgtcgagctgaaggagaaggtgttcgaggaggtgttcaagcgggtgaagcgggtgaccgggaagcggctgcgcgacttcctgatcgccgagggggccttcaagaagggcgacgagctgtccgggttcgaccagaacttcaagggctccctcaccgcctacctggacttcaagcgcatcctgggggagaagaagatccccaaggaggccatcgaggagatgatccaggccatcgtgctgttcggcgacgaccgcaagctgctgaagcggcgggtggagaagcggtacggcgagctgctctccaaggaggagatcgccgccatctgcaagctgaagtacaccggctggggccggctgagccgggagttcctggaggagatctacgtggtgaaccacaagaccggggagatgatcaacatcatctccatgatgcacgggaccaacgccaacctgatgcagctgctgagcagcgagtaccggttcaccgaggccctggaggcctacaacgaggagcggcagaccgaccactccgacatcgcctacgggatcgtgaaggacctgtacgtgagccccgccgtgcggcggtccatctggcagtccctgaagatcgtgaaggagatcgccaagatcaagaaggccgcccccaagaaggtgttcgtggaggtggcccgggagaacgccgagaagaagcggaccgtgtcccggaagaacgcgctgatcgccctgtacaagaactgcaaggaggaggagcgcgactggatcgccgagctcgacgccaagaccgaccacgagctgcggcgggaccggctgtacctgtactacacccagatgggccggtgcatgtacaccggcaagcccatcgacctgaaccggctgttcgacaccaacgtgtacgacgtggaccacatcttcccccagtccaagatcaaggacgacagcctgtccaaccgggtgctggtggagcggaaggtgaacgccaagaagtccgacgtgtaccccctgcccgaggagatccggaacaagaaccggggcttctggacaatgctgcaccgcaaggagctgatctccaagcggaagtacgaccggctcacccgggtgacccccttcagcgactccgagctggccgacttcatcgcccgccagctggtggagacacgccagagcaccaaggccgtggcccaggtgctgaagaaggtgttccccgacaccgacgtggtgtacgtgaaggccgggaacgtgtcccggttcaggtacgacttcaagatgatcaaggtgcgggaggtgaacgactaccaccacgccaaggacgcctacctgaacatcgtggtgggcaacgtgtacgacaccaagttcaccaagagccccctgaacttcatccaggggaaggacgggaagaactactccctgaaccagatgttcaactacgacgtggagcggtccggcgtgatcgcctggaaggccggcgagaagggcaccatcaccaccgtgaagcggatgatgaagaagaacaacatccagttcacccgccacgccttcgaggtgaagggcgggctgttcgaccagaccatcatgaagaagggcaagggccaggtgcccatcaagagctccgacgtgcacctgagcgacatcagcaagtacggcggctacaacaaggccgccggcgcctacttcttcctggtggagcacaccgtgaagaagaagcgcatccgcaccctggagttcgccccggtgtacctggccaagaagctggagaaccggtccgccctgctggagtactgcaagaacgagctgaacctgctggagagcaggatcctgctgcccaaggtgaagatcaacacgatgttcgagatcgacggcttcaagatgcacatctccggccggaccggcaagcaggtcatcttcaagggcgccgagcagctgtgcatctccgagcagtacggcctggacatcaagaagatcaacaagtacatccagcggtgcaagctggcccgggagaacctgcccgtgaccgccttcgacggcatcagcacccacaacaacgacgtgctgtacagcgtgatgatgcagaagctgaaggacaccgtgtacggcatccacctgtccagccagctgaagaacctggagaagggcaaggaggtgttcgggaagctgtccctgaaggagcagtgcgaggtgctgatggaggccctgaacctgttcagctgcaacagcagaagcgccaacttcaagctgatcaacagcggggcctcctgcggcaccctgcagctgtccaacaacttcagcaaccgcaagtccttcatcctgtacaaccagtccatcaccgggctgttcgagcagaaggtggacctgctgcggctgaagcggcccgccgccaccaagaaggccggccaggccaagaagaagaaggactacaaggacgacgacgacaagtaa

SEQ ID NO: 743 - DNA, 4140 bp, synthetic construct
  source 1..4140: mol_type = other DNA
atggccccaaagaagaagcggaaagtcatgtccatcgccgagaagaacaacagcgagtactacctcggcctggacatcggcaccgacagcgtgggctgggccgtgaccgacctggactacaacatccagaagttcaacggcaaggccatgtggggcatccgcctgttcgaggccggcaagacggccgccgagcggcgggtgttccgcaccacccggcgccgcatccagcggcgcaagcaccgcatcgagctgctgcaggagctgttcgacagcgagatctccaaggccgacaccaacttctacctgcggctgaaggagagcaagtactgggtggaggaccgcacgctggggcagaccaacatcctgttcaacgaccccgagtacaccgacaaggactactacaagcagtaccccaccatctaccacctgcggaaggagctgatgaccagcgacgagccgcacgacgtgcggctcgtctacctggccatccaccacctgatcaagaaccggggccacttcctgttcgagggggagggccggaaggacgtcagctccttcaaggtgatcttccgggagctgtgccagtccatgcacgacgagatggagatcgtgctggaggccgccgacctggacgaggtggaggcggtgctgaagaaccgggagtacgggatcaccgacaagaaaacccggctgaacaagctcctgaccatcgacgacgagcacaagaaggagcagaagtccatcatcgccctgctggccgggggcaagaccaaggtggacgccctgttcggggagaaaacctccgaggacagcgacgtgaaggacatcaccttcgccggggacaagttcgaggagagcttcgacgccctgagcatcatgctcggggacaagatgttctgcctcgagaagatgaaggccatctacgactggtccatcctggaggagatcctccagggcgaggactacctgtcctacgccaaggtggccacctacgagaagcacaagaacgacctggccaccctgaagaagatcatgaagaagtaccggtccgacgagtacgacgcctgcttcaaggaccccggcaagaaggacaactactgcgcctacgtggggatggccaagaagggcaagaagaagctggtgctggagaagaagtgctcccaggaggacctgtgcaagtacctgggcaaggtgttcaaggacgtgaagcagaacgaccccgacctgcagtacctgatggccgagatccagcggggcaccctgctgcccaagcaggtgaacaaggacaacggggtcatcccccaccagctccacctggaggagctgcggatgatcctggccaacgtgaagaagtacctggagttcctgaacgacaaggacgactccgggttcaccgtgagcgagaagatcgagaagatcttcgccttccggatcccctactacgtggggcccctgaacgcccaccacaagtccctgggccactgctggatcgtgcggaacaagggcatggagaaccagaaggtgctgccctggaacttcgacgagatcgtgaacctggaggccagcgccaccgccttcatccgcaagatgaccagcaagtgcacctacgtgatcggcgccgacgtggtgcccaagaactccctggtgtacagcgagtttatggtgctgaacgagctgaacaacgtgaaggtgaacggggagctgctgcccgtcgagctgaaggagaaggtgttcgaggaggtgttcaagcgggtgaagcgggtgaccgggaagcggctgcgcgacttcctgatcgccgagggggccttcaagaagggcgacgagctgtccgggttcgaccagaacttcaagggctccctcaccgcctacctggacttcaagcgcatcctgggggagaagaagatccccaaggaggccatcgaggagatgatccaggccatcgtgctgttcggcgacgaccgcaagctgctgaagcggcgggtggagaagcggtacggcgagctgctctccaaggaggagatcgccgccatctgcaagctgaagtacaccggctggggccggctgagccgggagttcctggaggagatctacgtggtgaaccacaagaccggggagatgatcaacatcatctccatgatgcacgggaccaacgccaacctgatgcagctgctgagcagcgagtaccggttcaccgaggccctggaggcctacaacgaggagcggcagaccgaccactccgacatcgcctacgggatcgtgaaggacctgtacgtgagccccgccgtgcggcggtccatctggcagtccctgaagatcgtgaaggagatcgccaagatcaagaaggccgcccccaagaaggtgttcgtggaggtggcccgggagaacgccgagaagaagcggaccgtgtcccggaagaacgcgctgatcgccctgtacaagaactgcaaggaggaggagcgcgactggatcgccgagctcgacgccaagaccgaccacgagctgcggcgggaccggctgtacctgtactacacccagatgggccggtgcatgtacaccggcaagcccatcgacctgaaccggctgttcgacaccaacgtgtacgacgtggaccacatcttcccccagtccaagatcaaggacgacagcctgtccaaccgggtgctggtggagcggaaggtgaacgccaagaagtccgacgtgtaccccctgcccgaggagatccggaacaagaaccggggcttctggacaatgctgcaccgcaaggagctgatctccaagcggaagtacgaccggctcacccgggtgacccccttcagcgactccgagctggccgacttcatcgcccgccagctggtggagacacgccagagcaccaaggccgtggcccaggtgctgaagaaggtgttccccgacaccgacgtggtgtacgtgaaggccgggaacgtgtcccggttcaggtacgacttcaagatgatcaaggtgcgggaggtgaacgactaccaccacgccaaggacgcctacctgaacatcgtggtgggcaacgtgtacgacaccaagttcaccaagagccccctgaacttcatccaggggaaggacgggaagaactactccctgaaccagatgttcaactacgacgtggagcggtccggcgtgatcgcctggaaggccggcgagaagggcaccatcaccaccgtgaagcggatgatgaagaagaacaacatccagttcacccgccacgccttcgaggtgaagggcgggctgttcgaccagaccatcatgaagaagggcaagggccaggtgcccatcaagagctccgacgtgcacctgagcgacatcagcaagtacggcggctacaacaaggccagaggcgcctacttcttcctggtggagcacaccgtgaagaagaagcgcatccgcaccctggagttcgccccggtgtacctggccaagaagctggagaaccggtccgccctgctggagtactgcaagaacgagctgaacctgctggagagcaggatcctgctgcccaaggtgaagatcaacacgatgttcgagatcgacggcttcaagatgcacatctccggccggaccggcaagcaggtcatcttcaagggcgccgagcagctgtgcatctccgagcagtacggcctggacatcaagaagatcaacaagtacatccagcggtgcaagctggcccgggagaacctgcccgtgaccgccttcgacggcatcagcacccacaacaacgacgtgctgtacagcgtgatgatgcagaagctgaaggacaccgtgtacggcatccacctgtccagccagctgaagaacctggagaagggcaaggaggtgttcgggaagctgtccctgaaggagcagtgcgaggtgctgatggaggccctgaacctgttcagctgcaacagcctgagcgccaacttcaagctgatcaacagcggggcctcctgcggcaccctgactctgtccaacaacttcagcaaccgcaagtccttcatcctgtacaaccagtccatcaccgggctgttcgagcagaaggtggacctgctgcggctgaagcggcccgccgccaccaagaaggccggccaggccaagaagaagaaggactacaaggacgacgacgacaagtaa

SEQ ID NO: 744 - DNA, 4140 bp, synthetic construct
  source 1..4140: mol_type = other DNA
atggccccaaagaagaagcggaaagtcatgtccatcgccgagaagaacaacagcgagtactacctcggcctggacatcggcaccgacagcgtgggctgggccgtgaccgacctggactacaacatccagaagttcaacggcaaggccatgtggggcatccgcctgttcgaggccggcaagacggccgccgagcggcgggtgttccgcaccacccggcgccgcatccagcggcgcaagcaccgcatcgagctgctgcaggagctgttcgacagcgagatctccaaggccgacaccaacttctacctgcggctgaaggagagcaagtactgggtggaggaccgcacgctggggcagaccaacatcctgttcaacgaccccgagtacaccgacaaggactactacaagcagtaccccaccatctaccacctgcggaaggagctgatgaccagcgacgagccgcacgacgtgcggctcgtctacctggccatccaccacctgatcaagaaccggggccacttcctgttcgagggggagggccggaaggacgtcagctccttcaaggtgatcttccgggagctgtgccagtccatgcacgacgagatggagatcgtgctggaggccgccgacctggacgaggtggaggcggtgctgaagaaccgggagtacgggatcaccgacaagaaaacccggctgaacaagctcctgaccatcgacgacgagcacaagaaggagcagaagtccatcatcgccctgctggccgggggcaagaccaaggtggacgccctgttcggggagaaaacctccgaggacagcgacgtgaaggacatcaccttcgccggggacaagttcgaggagagcttcgacgccctgagcatcatgctcggggacaagatgttctgcctcgagaagatgaaggccatctacgactggtccatcctggaggagatcctccagggcgaggactacctgtcctacgccaaggtggccacctacgagaagcacaagaacgacctggccaccctgaagaagatcatgaagaagtaccggtccgacgagtacgacgcctgcttcaaggaccccggcaagaaggacaactactgcgcctacgtggggatggccaagaagggcaagaagaagctggtgctggagaagaagtgctcccaggaggacctgtgcaagtacctgggcaaggtgttcaaggacgtgaagcagaacgaccccgacctgcagtacctgatggccgagatccagcggggcaccctgctgcccaagcaggtgaacaaggacaacggggtcatcccccaccagctccacctggaggagctgcggatgatcctggccaacgtgaagaagtacctggagttcctgaacgacaaggacgactccgggttcaccgtgagcgagaagatcgagaagatcttcgccttccggatcccctactacgtggggcccctgaacgcccaccacaagtccctgggccactgctggatcgtgcggaacaagggcatggagaaccagaaggtgctgccctggaacttcgacgagatcgtgaacctggaggccagcgccaccgccttcatccgcaagatgaccagcaagtgcacctacgtgatcggcgccgacgtggtgcccaagaactccctggtgtacagcgagtttatggtgctgaacgagctgaacaacgtgaaggtgaacggggagctgctgcccgtcgagctgaaggagaaggtgttcgaggaggtgttcaagcgggtgaagcgggtgaccgggaagcggctgcgcgacttcctgatcgccgagggggccttcaagaagggcgacgagctgtccgggttcgaccagaacttcaagggctccctcaccgcctacctggacttcaagcgcatcctgggggagaagaagatccccaaggaggccatcgaggagatgatccaggccatcgtgctgttcggcgacgaccgcaagctgctgaagcggcgggtggagaagcggtacggcgagctgctctccaaggaggagatcgccgccatctgcaagctgaagtacaccggctggggccggctgagccgggagttcctggaggagatctacgtggtgaaccacaagaccggggagatgatcaacatcatctccatgatgcacgggaccaacgccaacctgatgcagctgctgagcagcgagtaccggttcaccgaggccctggaggcctacaacgaggagcggcagaccgaccactccgacatcgcctacgggatcgtgaaggacctgtacgtgagccccgccgtgcggcggtccatctggcagtccctgaagatcgtgaaggagatcgccaagatcaagaaggccgcccccaagaaggtgttcgtggaggtggcccgggagaacgccgagaagaagcggaccgtgtcccggaagaacgcgctgatcgccctgtacaagaactgcaaggaggaggagcgcgactggatcgccgagctcgacgccaagaccgaccacgagctgcggcgggaccggctgtacctgtactacacccagatgggccggtgcatgtacaccggcaagcccatcgacctgaaccggctgttcgacaccaacgtgtacgacgtggaccacatcttcccccagtccaagatcaaggacgacagcctgtccaaccgggtgctggtggagcggaaggtgaacgccaagaagtccgacgtgtaccccctgcccgaggagatccggaacaagaaccggggcttctggacaatgctgcaccgcaaggagctgatctccaagcggaagtacgaccggctcacccgggtgacccccttcagcgactccgagctggccgacttcatcgcccgccagctggtggagacacgccagagcaccaaggccgtggcccaggtgctgaagaaggtgttccccgacaccgacgtggtgtacgtgaaggccgggaacgtgtcccggttcaggtacgacttcaagatgatcaaggtgcgggaggtgaacgactaccaccacgccaaggacgcctacctgaacatcgtggtgggcaacgtgtacgacaccaagttcaccaagagccccctgaacttcatccaggggaaggacgggaagaactactccctgaaccagatgttcaactacgacgtggagcggtccggcgtgatcgcctggaaggccggcgagaagggcaccatcaccaccgtgaagcggatgatgaagaagaacaacatccagttcacccgccacgccttcgaggtgaagggcgggctgttcgaccagaccatcatgaagaagggcaagggccaggtgcccatcaagagctccgacgtgcacctgagcgacatcagcaagtacggcggctacaacaaggccagaggcgcctacttcttcctggtggagcacaccgtgaagaagaagcgcatccgcaccctggagttcgccccggtgtacctggccaagaagctggagaaccggtccgccctgctggagtactgcaagaacgagctgaacctgctggagagcaggatcctgctgcccaaggtgaagatcaacacgatgttcgagatcgacggcttcaagatgcacatctccggccggaccggcaagcaggtcatcttcaagggcgccgagcagctgtgcatctccgagcagtacggcctggacatcaagaagatcaacaagtacatccagcggtgcaagctggcccgggagaacctgcccgtgaccgccttcgacggcatcagcacccacaacaacgacgtgctgtacagcgtgatgatgcagaagctgaaggacaccgtgtacggcatccacctgtccagccagctgaagaacctggagaagggcaaggaggtgttcgggaagctgtccctgaaggagcagtgcgaggtgctgatggaggccctgaacctgttcagctgcaacagcagaagcgccaacttcaagctgatcaacagcggggcctcctgcggcaccctgcagctgtccaacaacttcagcaaccgcaagtccttcatcctgtacaaccagtccatcaccgggctgttcgagcagaaggtggacctgctgcggctgaagcggcccgccgccaccaagaaggccggccaggccaagaagaagaaggactacaaggacgacgacgacaagtaa

SEQ ID NO: 745 - DNA, 4140 bp, synthetic construct
  source 1..4140: mol_type = other DNA
atggccccaaagaagaagcggaaagtcatgtccatcgccgagaagaacaacagcgagtactacctcggcctggacatcggcaccgacagcgtgggctgggccgtgaccgacctggactacaacatccagaagttcaacggcaaggccatgtggggcatccgcctgttcgaggccggcaagacggccgccgagcggcgggtgttccgcaccacccggcgccgcatccagcggcgcaagcaccgcatcgagctgctgcaggagctgttcgacagcgagatctccaaggccgacaccaacttctacctgcggctgaaggagagcaagtactgggtggaggaccgcacgctggggcagaccaacatcctgttcaacgaccccgagtacaccgacaaggactactacaagcagtaccccaccatctaccacctgcggaaggagctgatgaccagcgacgagccgcacgacgtgcggctcgtctacctggccatccaccacctgatcaagaaccggggccacttcctgttcgagggggagggccggaaggacgtcagctccttcaaggtgatcttccgggagctgtgccagtccatgcacgacgagatggagatcgtgctggaggccgccgacctggacgaggtggaggcggtgctgaagaaccgggagtacgggatcaccgacaagaaaacccggctgaacaagctcctgaccatcgacgacgagcacaagaaggagcagaagtccatcatcgccctgctggccgggggcaagaccaaggtggacgccctgttcggggagaaaacctccgaggacagcgacgtgaaggacatcaccttcgccggggacaagttcgaggagagcttcgacgccctgagcatcatgctcggggacaagatgttctgcctcgagaagatgaaggccatctacgactggtccatcctggaggagatcctccagggcgaggactacctgtcctacgccaaggtggccacctacgagaagcacaagaacgacctggccaccctgaagaagatcatgaagaagtaccggtccgacgagtacgacgcctgcttcaaggaccccggcaagaaggacaactactgcgcctacgtggggatggccaagaagggcaagaagaagctggtgctggagaagaagtgctcccaggaggacctgtgcaagtacctgggcaaggtgttcaaggacgtgaagcagaacgaccccgacctgcagtacctgatggccgagatccagcggggcaccctgctgcccaagcaggtgaacaaggacaacggggtcatcccccaccagctccacctggaggagctgcggatgatcctggccaacgtgaagaagtacctggagttcctgaacgacaaggacgactccgggttcaccgtgagcgagaagatcgagaagatcttcgccttccggatcccctactacgtggggcccctgaacgcccaccacaagtccctgggccactgctggatcgtgcggaacaagggcatggagaaccagaaggtgctgccctggaacttcgacgagatcgtgaacctggaggccagcgccaccgccttcatccgcaagatgaccagcaagtgcacctacgtgatcggcgccgacgtggtgcccaagaactccctggtgtacagcgagtttatggtgctgaacgagctgaacaacgtgaaggtgaacggggagctgctgcccgtcgagctgaaggagaaggtgttcgaggaggtgttcaagcgggtgaagcgggtgaccgggaagcggctgcgcgacttcctgatcgccgagggggccttcaagaagggcgacgagctgtccgggttcgaccagaacttcaagggctccctcaccgcctacctggacttcaagcgcatcctgggggagaagaagatccccaaggaggccatcgaggagatgatccaggccatcgtgctgttcggcgacgaccgcaagctgctgaagcggcgggtggagaagcggtacggcgagctgctctccaaggaggagatcgccgccatctgcaagctgaagtacaccggctggggccggctgagccgggagttcctggaggagatctacgtggtgaaccacaagaccggggagatgatcaacatcatctccatgatgcacgggaccaacgccaacctgatgcagctgctgagcagcgagtaccggttcaccgaggccctggaggcctacaacgaggagcggcagaccgaccactccgacatcgcctacgggatcgtgaaggacctgtacgtgagccccgccgtgcggcggtccatctggcagtccctgaagatcgtgaaggagatcgccaagatcaagaaggccgcccccaagaaggtgttcgtggaggtggcccgggagaacgccgagaagaagcggaccgtgtcccggaagaacgcgctgatcgccctgtacaagaactgcaaggaggaggagcgcgactggatcgccgagctcgacgccaagaccgaccacgagctgcggcgggaccggctgtacctgtactacacccagatgggccggtgcatgtacaccggcaagcccatcgacctgaaccggctgttcgacaccaacgtgtacgacgtggaccacatcttcccccagtccaagatcaaggacgacagcctgtccaaccgggtgctggtggagcggaaggtgaacgccaagaagtccgacgtgtaccccctgcccgaggagatccggaacaagaaccggggcttctggacaatgctgcaccgcaaggagctgatctccaagcggaagtacgaccggctcacccgggtgacccccttcagcgactccgagctggccgacttcatcgcccgccagctggtggagacacgccagagcaccaaggccgtggcccaggtgctgaagaaggtgttccccgacaccgacgtggtgtacgtgaaggccgggaacgtgtcccggttcaggtacgacttcaagatgatcaaggtgcgggaggtgaacgactaccaccacgccaaggacgcctacctgaacatcgtggtgggcaacgtgtacgacaccaagttcaccaagagccccctgaacttcatccaggggaaggacgggaagaactactccctgaaccagatgttcaactacgacgtggagcggtccggcgtgatcgcctggaaggccggcgagaagggcaccatcaccaccgtgaagcggatgatgaagaagaacaacatccagttcacccgccacgccttcgaggtgaagggcgggctgttcgaccagaccatcatgaagaagggcaagggccaggtgcccatcaagagctccgacgtgcacctgagcgacatcagcaagtacggcggctacaacaaggccagaggcgcctacttcttcctggtggagcacaccgtgaagaagaagcgcatccgcaccctggagttcgccccggtgtacctggccaagaagctggagaaccggtccgccctgctggagtactgcaagaacgagctgaacctgctggagagcaggatcctgctgcccaaggtgaagatcaacacgatgttcgagatcgacggcttcaagatgcacatctccggccggaccggcaagcaggtcatcttcaagggcgccgagcagctgtgcatctccgagcagtacggcctggacatcaagaagatcaacaagtacatccagcggtgcaagctggcccgggagaacctgcccgtgaccgccttcgacggcatcagcacccacaacaacgacgtgctgtacagcgtgatgatgcagaagctgaaggacaccgtgtacggcatccacctgtccagccagctgaagaacctggagaagggcaaggaggtgttcgggaagctgtccctgaaggagcagtgcgaggtgctgatggaggccctgaacctgttcagctgcaacagcagaagcgccaacttcaagctgatcaacagcggggcctcctgcggcaccctgactctgtccaacaacttcagcaaccgcaagtccttcatcctgtacaaccagtccatcaccgggctgttcgagcagaaggtggacctgctgcggctgaagcggcccgccgccaccaagaaggccggccaggccaagaagaagaaggactacaaggacgacgacgacaagtaa

SEQ ID NO: 746-760 - skipped (15 entries)

SEQ ID NO: 761 - RNA, 20 nt, synthetic construct
  source 1..20: mol_type = other RNA
ccagcaatccgctccgtgtc

SEQ ID NO: 762 - RNA, 20 nt, synthetic construct
  source 1..20: mol_type = other RNA
ccagcaatccgctccgtgtc

SEQ ID NO: 763 - RNA, 20 nt, synthetic construct
  source 1..20: mol_type = other RNA
ccacagacccttggtttata

SEQ ID NO: 764 - RNA, 20 nt, synthetic construct
  source 1..20: mol_type = other RNA
tttggtcactctccatccag

SEQ ID NO: 765 - RNA, 20 nt, synthetic construct
  source 1..20: mol_type = other RNA
gagtgaaagaatgactctct

SEQ ID NO: 766 - RNA, 20 nt, synthetic construct
  source 1..20: mol_type = other RNA
gactcatttggctacagtgc

SEQ ID NO: 767 - DNA, 20 bp, synthetic construct
  source 1..20: mol_type = other DNA
cagtattctggggtaagctc

SEQ ID NO: 768 - DNA, 20 bp, synthetic construct
  source 1..20: mol_type = other DNA
gtgtgctaatttatatgctc

SEQ ID NO: 769 - RNA, 20 nt, synthetic construct
  source 1..20: mol_type = other RNA
accattaccagacatatgaa

SEQ ID NO: 770 - RNA, 20 nt, synthetic construct
  source 1..20: mol_type = other RNA
tctacttctctgtgtttctg

SEQ ID NO: 771 - RNA, 20 nt, synthetic construct
  source 1..20: mol_type = other RNA
caggcagtcgtactacaagg

SEQ ID NO: 772 - RNA, 20 nt, synthetic construct
  source 1..20: mol_type = other RNA
atgtgtgtgtatacatagtc

SEQ ID NO: 773 - RNA, 20 nt, synthetic construct
  source 1..20: mol_type = other RNA
ggcaccaagcaccatcatcc

SEQ ID NO: 774 - RNA, 20 nt, synthetic construct
  source 1..20: mol_type = other RNA
gttgcaggaacctgtacata

SEQ ID NO: 775 - RNA, 20 nt, synthetic construct
  source 1..20: mol_type = other RNA
tgagttgcatggggcatact

SEQ ID NO: 776 - RNA, 20 nt, synthetic construct
  source 1..20: mol_type = other RNA
tagcaaagccatttcatgaa

SEQ ID NO: 777-780 - skipped (4 entries)

SEQ ID NO: 781 - RNA, 20 nt, synthetic construct
  source 1..20: mol_type = other RNA
tagccaggatcaacaagcac

SEQ ID NO: 782 - RNA, 20 nt, synthetic construct
  source 1..20: mol_type = other RNA
aaaatggtagtggagcagaa

SEQ ID NO: 783 - RNA, 20 nt, synthetic construct
  source 1..20: mol_type = other RNA
atgattctgggctagagctt

SEQ ID NO: 784 - RNA, 20 nt, synthetic construct
  source 1..20: mol_type = other RNA
ttccccattaaaataccaga

SEQ ID NO: 785 - RNA, 20 nt, synthetic construct
  source 1..20: mol_type = other RNA
gatgtggcaacccaaaatga

SEQ ID NO: 786 - RNA, 20 nt, synthetic construct
  source 1..20: mol_type = other RNA
atattcagtgggcatgcatt

SEQ ID NO: 787 - RNA, 20 nt, synthetic construct
  source 1..20: mol_type = other RNA
taaagctaacctcacagcca

SEQ ID NO: 788 - protein, 20 aa, synthetic construct
GGCTGTTGCTATATAAATGG

SEQ ID NO: 789 - RNA, 20 nt, synthetic construct
  source 1..20: mol_type = other RNA
gagccttgggtcttcatgaa

SEQ ID NO: 790 - DNA, 20 bp, synthetic construct
  source 1..20: mol_type = other DNA
tgatgcagtttatatcctcc

SEQ ID NO: 791 - RNA, 20 nt, synthetic construct
  source 1..20: mol_type = other RNA
tttggaattggtcagtgaga

SEQ ID NO: 792 - RNA, 20 nt, synthetic construct
  source 1..20: mol_type = other RNA
gtacagaagaggggaaagta

SEQ ID NO: 793 - RNA, 20 nt, synthetic construct
  source 1..20: mol_type = other RNA
cattctctaagcacaaagct

SEQ ID NO: 794 - RNA, 20 nt, synthetic construct
  source 1..20: mol_type = other RNA
gggagaagaccttaggaaag

SEQ ID NO: 795 - RNA, 20 nt, synthetic construct
  source 1..20: mol_type = other RNA
cataaggaggacacgtttca

SEQ ID NO: 796 - RNA, 20 nt, synthetic construct
  source 1..20: mol_type = other RNA
agtagtgttagaggagatga

SEQ ID NO: 797 - RNA, 20 nt, synthetic construct
  source 1..20: mol_type = other RNA
tccttccaaggtcattagaa

SEQ ID NO: 798 - RNA, 20 nt, synthetic construct
  source 1..20: mol_type = other RNA
acacctacgctcttagcacc

SEQ ID NO: 799 - RNA, 20 nt, synthetic construct
  source 1..20: mol_type = other RNA
tgcggaagctgaggctcgcc

SEQ ID NO: 800 - RNA, 20 nt, synthetic construct
  source 1..20: mol_type = other RNA
atgagaacttggttcattga

SEQ ID NO: 801 - RNA, 20 nt, synthetic construct
  source 1..20: mol_type = other RNA
tcaaacgtatacttgaagac

SEQ ID NO: 802 - RNA, 20 nt, synthetic construct
  source 1..20: mol_type = other RNA
aaaataccagagataatgga

SEQ ID NO: 803 - RNA, 20 nt, synthetic construct
  source 1..20: mol_type = other RNA
atctctctccagactctagg

SEQ ID NO: 804 - RNA, 20 nt, synthetic construct
  source 1..20: mol_type = other RNA
aagtctgtctagtcattgta

SEQ ID NO: 805-820 - skipped (16 entries)

SEQ ID NO: 821 - RNA, 109 nt, synthetic construct; identical to SEQ ID NO: 275
  source 1..109: mol_type = other RNA

SEQ ID NO: 822 - RNA, 90 nt, synthetic construct
  source 1..90: mol_type = other RNA
tacaccataagttcaaataaagattttatccaaatcgtcatgtttacatgaccccacagtgtgtggattaaacttgcttcggcaagtttt

SEQ ID NO: 823 - RNA, 90 nt, synthetic construct
  source 1..90: mol_type = other RNA
tacaccataagttcaaataaagatcttatccagatcgtcatgtttacatgaccccacagtgtgtggattaaacttgcttcggcaagtttt

SEQ ID NO: 824 - RNA, 96 nt, synthetic construct
  source 1..96: mol_type = other RNA
tacaccataagttcaaataaagattttatccaaatcgtcatgtttacatgaccccacgacagtgtgtcgtggattaaacttgcttcggcaagtttt

SEQ ID NO: 825 - RNA, 96 nt, synthetic construct
  source 1..96: mol_type = other RNA
tacaccataagttcaaataaagatcttatccagatcgtcatgtttacatgaccccacgacagtgtgtcgtggattaaacttgcttcggcaagtttt

SEQ ID NO: 826 - RNA, 69 nt, synthetic construct
  source 1..69: mol_type = other RNA
tacaccataagttcaaataaagattttatccaaatcgtcatgtttacatgaccccacagtgtgtggatt

SEQ ID NO: 827-840 - skipped (14 entries)

SEQ ID NO: 841 - RNA, 146 nt, synthetic construct
  source 1..146: mol_type = other RNA
gtttgagaatggtgtaattctgtatgtagtcaagaaattgactaccatacaagattacaccataagttcaaataaagattttatccaaatcgtcatgtttacatgaccccacagtgtgtggattaaacttgcttcggcaagttttt

SEQ ID NO: 842 - RNA, 110 nt, synthetic construct
  source 1..110: mol_type = other RNA
gtttgagaatggtgtagaaatacaccataagttcaaataaagattttatccaaatcgtcatgtttacatgaccccacagtgtgtggattaaacttgcttcggcaagtttt

SEQ ID NO: 843 - RNA, 110 nt, synthetic construct
  source 1..110: mol_type = other RNA
gtttgagaatggtgtagaaatacaccataagttcaaataaagatcttatccagatcgtcatgtttacatgaccccacagtgtgtggattaaacttgcttcggcaagtttt

SEQ ID NO: 844 - RNA, 116 nt, synthetic construct
  source 1..116: mol_type = other RNA
gtttgagaatggtgtagaaatacaccataagttcaaataaagattttatccaaatcgtcatgtttacatgaccccacgacagtgtgtcgtggattaaacttgcttcggcaagtttt

SEQ ID NO: 845 - RNA, 116 nt, synthetic construct
  source 1..116: mol_type = other RNA
gtttgagaatggtgtagaaatacaccataagttcaaataaagatcttatccagatcgtcatgtttacatgaccccacgacagtgtgtcgtggattaaacttgcttcggcaagtttt

SEQ ID NO: 846 - RNA, 89 nt, synthetic construct
  source 1..89: mol_type = other RNA
gtttgagaatggtgtagaaatacaccataagttcaaataaagattttatccaaatcgtcatgtttacatgaccccacagtgtgtggatt

SEQ ID NO: 847-860 - skipped (14 entries)

SEQ ID NO: 861 - RNA, 166 nt, synthetic construct
  source 1..166: mol_type = other RNA
nnnnnnnnnnnnnnnnnnnngtttgagaatggtgtaattctgtatgtagtcaagaaattgactaccatacaagattacaccataagttcaaataaagattttatccaaatcgtcatgtttacatgaccccacagtgtgtggattaaacttgcttcggcaagttttt

SEQ ID NO: 862 - RNA, 130 nt, synthetic construct
  source 1..130: mol_type = other RNA
nnnnnnnnnnnnnnnnnnnngtttgagaatggtgtagaaatacaccataagttcaaataaagattttatccaaatcgtcatgtttacatgaccccacagtgtgtggattaaacttgcttcggcaagtttt

SEQ ID NO: 863 - RNA, 130 nt, synthetic construct
  source 1..130: mol_type = other RNA
nnnnnnnnnnnnnnnnnnnngtttgagaatggtgtagaaatacaccataagttcaaataaagatcttatccagatcgtcatgtttacatgaccccacagtgtgtggattaaacttgcttcggcaagtttt

SEQ ID NO: 864 - RNA, 136 nt, synthetic construct
  source 1..136: mol_type = other RNA
nnnnnnnnnnnnnnnnnnnngtttgagaatggtgtagaaatacaccataagttcaaataaagattttatccaaatcgtcatgtttacatgaccccacgacagtgtgtcgtggattaaacttgcttcggcaagtttt

SEQ ID NO: 865 - RNA, 136 nt, synthetic construct
  source 1..136: mol_type = other RNA
nnnnnnnnnnnnnnnnnnnngtttgagaatggtgtagaaatacaccataagttcaaataaagatcttatccagatcgtcatgtttacatgaccccacgacagtgtgtcgtggattaaacttgcttcggcaagtttt

SEQ ID NO: 866 - RNA, 109 nt, synthetic construct
  source 1..109: mol_type = other RNA
nnnnnnnnnnnnnnnnnnnngtttgagaatggtgtagaaatacaccataagttcaaataaagattttatccaaatcgtcatgtttacatgaccccacagtgtgtggatt

SEQ ID NO: 867-880 - skipped (14 entries)

SEQ ID NO: 881 - RNA, 20 nt, synthetic construct
  source 1..20: mol_type = other RNA
aatcgtactggaagacactt

SEQ ID NO: 882 - RNA, 20 nt, synthetic construct
  source 1..20: mol_type = other RNA
gctgagcagggctgcgatgg

SEQ ID NO: 883 - RNA, 20 nt, synthetic construct
  source 1..20: mol_type = other RNA
cctgtgagcgatccagacat

SEQ ID NO: 884 - RNA, 20 nt, synthetic construct
  source 1..20: mol_type = other RNA
gaactagagtactcagactc

SEQ ID NO: 885 - RNA, 20 nt, synthetic construct
  source 1..20: mol_type = other RNA
tctgggggatctggttgatt

SEQ ID NO: 886 - RNA, 20 nt, synthetic construct
  source 1..20: mol_type = other RNA
agcatgaccaggaaccagag

SEQ ID NO: 887 - RNA, 20 nt, synthetic construct
  source 1..20: mol_type = other RNA
agcacttagcagagcagcta

SEQ ID NO: 888 - RNA, 20 nt, synthetic construct
  source 1..20: mol_type = other RNA
ggtggaaatggaaatcactt

SEQ ID NO: 889 - RNA, 20 nt, synthetic construct
  source 1..20: mol_type = other RNA
tagattccacagccagaatc

SEQ ID NO: 890 - RNA, 20 nt, synthetic construct
  source 1..20: mol_type = other RNA
taggttgatcataaggatga

SEQ ID NO: 891 - RNA, 20 nt, synthetic construct
  source 1..20: mol_type = other RNA
aatactccgcactcaaaggc

SEQ ID NO: 892 - RNA, 20 nt, synthetic construct
  source 1..20: mol_type = other RNA
tctcatctaatgctagaggc

SEQ ID NO: 893 - RNA, 20 nt, synthetic construct
  source 1..20: mol_type = other RNA
gttgctgcacccatgtctca

SEQ ID NO: 894 - RNA, 20 nt, synthetic construct
  source 1..20: mol_type = other RNA
gaggaccaggatcttgccaa

SEQ ID NO: 895 - RNA, 20 nt, synthetic construct
  source 1..20: mol_type = other RNA
ttactctgacccatttcact

SEQ ID NO: 896-900 - skipped (5 entries)

SEQ ID NO: 901 - RNA, 18 nt, synthetic construct
  source 1..18: mol_type = other RNA
aggcacccggtaaatatt

SEQ ID NO: 902 - RNA, 19 nt, synthetic construct
  source 1..19: mol_type = other RNA
taggcacccggtaaatatt

SEQ ID NO: 903 - RNA, 20 nt, synthetic construct
  source 1..20: mol_type = other RNA
ataggcacccggtaaatatt

SEQ ID NO: 904 - RNA, 21 nt, synthetic construct
  source 1..21: mol_type = other RNA
aataggcacccggtaaatatt

SEQ ID NO: 905 - RNA, 22 nt, synthetic construct
  source 1..22: mol_type = other RNA
aaataggcacccggtaaatatt

SEQ ID NO: 906 - RNA, 23 nt, synthetic construct
  source 1..23: mol_type = other RNA
aaaataggcacccggtaaatatt

SEQ ID NO: 907 - RNA, 25 nt, synthetic construct
  source 1..25: mol_type = other RNA
aaaaaataggcacccggtaaatatt

SEQ ID NO: 908 - RNA, 27 nt, synthetic construct
  source 1..27: mol_type = other RNA
aaaaaaaataggcacccggtaaatatt

SEQ ID NO: 909 - RNA, 18 nt, synthetic construct
  source 1..18: mol_type = other RNA
gtgaaagaatgactctct

SEQ ID NO: 910 - RNA, 19 nt, synthetic construct
  source 1..19: mol_type = other RNA
agtgaaagaatgactctct

SEQ ID NO: 911 - RNA, 20 nt, synthetic construct
  source 1..20: mol_type = other RNA
gagtgaaagaatgactctct

SEQ ID NO: 912 - RNA, 21 nt, synthetic construct
  source 1..21: mol_type = other RNA
ggagtgaaagaatgactctct

SEQ ID NO: 913 - RNA, 22 nt, synthetic construct
  source 1..22: mol_type = other RNA
aggagtgaaagaatgactctct

SEQ ID NO: 914 - RNA, 23 nt, synthetic construct
  source 1..23: mol_type = other RNA
taggagtgaaagaatgactctct

SEQ ID NO: 915 - RNA, 25 nt, synthetic construct
  source 1..25: mol_type = other RNA
cctaggagtgaaagaatgactctct

SEQ ID NO: 916 - RNA, 27 nt, synthetic construct
  source 1..27: mol_type = other RNA
ggcctaggagtgaaagaatgactctct

SEQ ID NO: 917 - RNA, 18 nt, synthetic construct
  source 1..18: mol_type = other RNA
cattaccagacatatgaa

SEQ ID NO: 918 - RNA, 19 nt, synthetic construct
  source 1..19: mol_type = other RNA
ccattaccagacatatgaa

SEQ ID NO: 919 - RNA, 20 nt, synthetic construct
  source 1..20: mol_type = other RNA
accattaccagacatatgaa

SEQ ID NO: 920 - RNA, 21 nt, synthetic construct
  source 1..21: mol_type = other RNA
aaccattaccagacatatgaa

SEQ ID NO: 921 - RNA, 22 nt, synthetic construct
  source 1..22: mol_type = other RNA
taaccattaccagacatatgaa

SEQ ID NO: 922 - RNA, 23 nt, synthetic construct
  source 1..23: mol_type = other RNA
ataaccattaccagacatatgaa

SEQ ID NO: 923 - RNA, 25 nt, synthetic construct
  source 1..25: mol_type = other RNA
agataaccattaccagacatatgaa

SEQ ID NO: 924 - RNA, 27 nt, synthetic construct
  source 1..27: mol_type = other RNA
atagataaccattaccagacatatgaa